(19) United States
(12) Patent Application Publication
(10) Pub. No.: US 2020/0325182 A1
(43) Pub. Date: Oct. 15, 2020

(54) ALPHAHERPESVIRUS GLYCOPROTEIN D-ENCODING NUCLEIC ACID CONSTRUCTS AND METHODS

(71) Applicant: MBF Therapeutics, Inc., Ambler, PA (US)

(72) Inventors: Lorraine Keller, Pipersville, PA (US); Malla Padidam, Chalfont, PA (US)

(21) Appl. No.: 16/917,899

(22) Filed: Jun. 30, 2020

Related U.S. Application Data
(60) Provisional application No. 63/038,117, filed on Jun. 11, 2020.

(51) Int. Cl. C07K 14/005; C07K 14/74; A61P 35/00

(52) U.S. Cl. CPC C07K 14/005; C07K 14/70539; A61K 2039/53; C12N 2710/16021; C07K 2319/70; A61P 35/00

(57) ABSTRACT

This invention provides new compositions comprising nucleotide sequence(s) encoding alphaherpesvirus glycoprotein D protein(s) (gDP(s)) and antigen(s) that induce immune responses. Such sequences typically encode gDP:antigen fusion proteins and typically also include feature(s) that significantly enhance immune responses such as (a) sequences encoding ITIC signal transducing adaptor proteins, e.g., SLAM-associated proteins (SAPs), Ewing's sarcoma-associated transcript 2 proteins, or both, or non-gDP checkpoint inhibitor(s); (b) sequences encoding antigen-associated targeting sequences, e.g., polyubiquitin sequences; (c) deimmunized/modified antigen-encoding sequences; (d) gDP(s) with modified sequence(s); (e) expression-enhancing introns; (f) transfection-facilitating agents; or (g) combinations thereof. Methods of using such constructs to induce immune responses and other methods and compositions also are provided, including methods of using such constructs in animals not known to express Herpesvirus entry mediator (HVEM) receptors (e.g., pigs), animals not under disease agent-associated checkpoint inhibition, and other contexts.

### CROSS-REFERENCE TO RELATED APPLICATIONS (PRIORITY)

[0001] This application claims the benefit of U.S. Provisional Application No. 63/038,117, titled “IMPROVED ALPHAHERPESVIRUS GLYCOPROTEIN D-ENCODING NUCLEIC ACID CONSTRUCTS AND METHODS”, filed Jun. 11, 2020.

### REFERENCE TO SEQUENCE LISTING SUBMITTED ELECTRONICALLY

[0002] The content of the electronically submitted sequence listing in ASCII text file with the following identifiers: Name: “20200630_MBF2024USMBZ_ST25_FINAL”; Size: 1,459 kilobytes (1,459,000 bytes); and Date of Creation: Jun. 30, 2020, filed with the application, is incorporated herein by reference in its entirety.

### BACKGROUND OF THE INVENTION

[0003] Despite now well over 100 years of immunological research, and more recently the development of advanced biotechnological approaches to modulating the immune system, immunological diseases and conditions remain a significant challenge in both humans and non-human animal populations.

[0004] The oldest and most applied application of immune system modulation is the administration of vaccines derived from pathogens. Numerous approaches to vaccination are known in the art. In general, all vaccination methods rely on the introduction of an antigen, typically as a peptide/protein or collection of peptides/proteins associated with a disease-causing agent, which elicits an immunological response, such as the production of antibodies from antibody-producing B cells (which is also known as humoral immune response). Such methods have been enhanced by methods for optimizing antigen selection and dosing and through the associated use of adjuvants (substances that enhance the immune response to an antigen). Examples of well-characterized and frequently used adjuvants include mineral salts (e.g., aluminum salts), oil emulsions, microbial polysaccharides, and saponins. More recently, many cytokines that promote immune system activity have been isolated and characterized which can also act as adjuvants (e.g., interferons and interleukins). Synthetic antigens also are known.

[0005] The administration of vaccines, resulting in prevention of infection by or protection against disease-causing agents, is also sometimes referred to as “immunization.” However, it is important to understand that immune system modulation can be prophylactic, as in the case of vaccines, or therapeutic (immunotherapy). Therapeutic immunization—treatment of patients that already have a disease that may be regulated through the immune system, e.g., cancer, chronic viral infections—is one distinguishing aspect of the newer field of immunotherapy (over traditional vaccination).

[0006] Vaccines have been effective against a number of pathogenic conditions, and the promise of immune system modulation has fueled research into finding more effective antigens against diseases that impact people and animals. Scientists have now characterized and described numerous antigens for clinical use as peptide/protein vaccines, especially among better studied disease-causing agents. Prophylactic vaccines against a number of disease-causing agents are currently on the market, including vaccines against Chickenpox (Varicella), Cholera, Diphtheria, Flu (Influenza), Hepatitis A, Hepatitis B, Hib (Hemophilus Influenzae Type B), HPV (Human Papillomavirus), Japanese Encephalitis (JE), Measles, Meningococcal, Mumps, Pneumococcal, Polio, Rabies, Rotavirus, Rubella (German Measles, Shingles (Herpes Zoster), Tetanus (Lockjaw), and Typhoid Fever, Porcine Respiratory and Reproductive Virus, Porcine Circovirus, Canine Influenza, Canine Parvovirus, Newcastle Virus, and Bovine Diarrheal Virus, among others. The promise of vaccination also has led to significant research focused on the characterization of antigens and associated immune responses in both pathogenic diseases and cancer. Specific well-characterized antigens that have been repeatedly studied for development of immune responses include the Hepatitis B Surface Antigen (HBsAg), Hepatitis B Core Antigen (HBcAg), Hepatitis C Virus core antigen (HCVcAg), HIV glycoprotein (gp)120, Herpes Virus Glycoprotein B (gB), and various forms of alphaherpesvirus Glycoprotein D (gD).

[0007] Despite such research, many vaccination approaches, while initially successful, are not sufficiently protective against later challenge with the same pathogen. The immune system's ability to more rapidly respond to antigens similar to those a subject has been exposed to in the past is known as “immunological memory.” Immunologists often characterize vaccination approaches that result in an immune response that is only partially effective against subsequent challenges as “leaky vaccines.” (SFE Edlefsen P T. Comput Math Methods Med. 2014; 2014:813789. doi:10.1155/2014/813789) The “leaky” characterization of such vaccines reflects that while such vaccines can elicit an immune response to a subsequent challenge with a related antigen-associated agent, the response is not sustaining or complete (sterilizing), and, thus, typically also is not sufficient to adequately block disease or spread of the disease in the population. Panagioti et al. similarly report “After resolution of the infection, the majority (90-95%) of the effector T cells are eliminated due to programmed cell death and only a small, yet diverse pool of memory cells remains,” Front. Immunol., 16 Feb. 2018. https://doi.org/10.3389/fimmu.2018.00276, reflecting the fact that many current vaccines are not capable of creating protective immunological memory.

[0008] Possibly because of these and similar shortcomings, many diseases have been studied for vaccine development but without established clinical success to date, such as Dengue, Helicobacter pylori, and Malaria. Further, even on-market vaccines can have limited efficacy, especially in certain populations such as those with challenged or deficient immune systems or the elderly. According to Kim et al., Clin Exp Immunol. 2017 January; 187(1): 71-81. doi: 10.1111/cei.12829, for example, although influenza vaccination has rapidly increased the “burden of mortality and morbidity linked to influenza infection in the older population remains high,” with effectiveness of the vaccine estimated to be as low as 30%. Kim et al. reports that similar declining efficacies occur with vaccination with the attenuated varicella zoster virus (VZV), declining from 70% for 50-59-year-old adults to 38% for adults aged 70 years and older.

[0009] With better research it is now understand that many viruses enter host cells within minutes of infection where they are immediately sequestered from contact with B cells and free to proliferate and release virus progeny into circulation. For example, African Swine Fever Virus enters host cells within 10 minutes of infection (SFE Hernáez B, Guerra M, Salas M L, Andres G. PLoS Pathog. 2016; 12(4):e1005595. doi:10.1371/journal.ppat.1005595) and influenza virus enters/fuses with host cells in approximately 10 minutes and is inside nucleus in approximately 1 hour (Dou D et al. Front Immunol. 2018; 9:1581. doi:10.3389/fimmu.2018.01581). Thus, such pathogens can evade protection through humoral immunity-focused approaches.

[0010] Over recent decades the ability to effectively modulate the immune system has increased with breakthroughs in the fields of understanding both “cellular” (T cell-mediated) immunity as a key part (along with B cells) of “adaptive immunity” and innate immunity, as well as the understanding that certain disease-associated agents (e.g., cancer cells and some chronically infected cells) are able to evade the body's normal immunological responses through modulation of checkpoint systems.

[0011] The innate and adaptive immune systems have been extensively characterized in the art. Briefly, the innate immune system includes physical barriers such as skin and mucosa; physical responses such as tears, stomach acids, and the cough reflex; and a number of specialized cells, particularly phagocytes, including monocytes, macrophages, and neutrophils. One recent useful overview of the relationship between various cells of the immune system is provided in Lasaro et al., Human Vaccines, 5:1, 6-14, DOI: 10.4161/hv.5.1.6399 (2009), but others are available.

[0012] Natural killer (“NK”) cells and dendritic cells (“DCs”) have traditionally also been characterized as innate immune cells. However, such cells also are now understood to reflect characteristics of adaptive immunity and to play key roles in the interplay between innate immunity and classical adaptive immunity. For example, it has been demonstrated that NK cells also can exhibit immunological memory and a body of research is demonstrating that the innate immune responses can contribute significantly to immunity in certain contexts, though these principles still often remain poorly understood. Dendritic cells which are both considered a key link between innate and natural immunity and a key antigen presenting cell (“APC”) have been the focus of extensive research and development in connection with the treatment of immunologically mediated diseases and conditions. In 2010, the US FDA approved the first DC-based immunotherapy (Provenge®) for patients with advanced prostate cancers. However, thus far only a few DC-based treatment strategies have been tested for viral conditions in clinical trials. Efficacy in many trials targeting dendritic cells to date has been, “at best, mixed, and in many cases little efficacy has been demonstrated with such approaches, particularly with respect to reductions in viral load” and “the immunological responses [in such trials] were either weak or transient and, more importantly, reduction in viral load has been observed in only a few of these studies.” Atanley E et al. Expert Rev Clin Immunol. 2014; 10(6):801-813. doi:10.1586/1744666X.2014.907742. Other recent research has demonstrated that DCs are often ineffective at antigen presentation because of suboptimal levels of major histocompatibility complex (MHC) class II and low levels of costimulator molecules as well as adhesion molecules, necessary for the effective interaction of DCs with other key immune system cells, such as T cells. See Chen P, et al. Hum Vaccin Immunother. 2016; 12(3):612-622. doi:10.1080/21645515.2015.1105415.

[0013] Despite these advances, most available vaccines remain directed to generating B cell responses. However, recent research indicates that T cell immunity appears particularly relevant to certain conditions, such as some viral infections, in particular chronic infections (vs self-limiting conditions), and cancer. SFE Pangioti et al, supra. However, the number of effector cells required for an effective T cell response are “exponentially larger” than the number of cells required for an effective B cell response. SFE Pennock et al., Trends in Immunology. Vol. 37, ISS. 3, p 170-180, March 2016. DOI: 10.1016/j.it.2016.01.001. As such, most modern adjuvants and formulations can produce the required number of effectors for effective B cell immunity, but not for T cell immunity. Id. Moreover, the magnitude of viral-specific T cell responses is highly dictated by the infectious dose and route of infection, with higher infectious dosages leading generally to higher peak values of effector T cells, and correspondingly larger amounts of memory T cells in the circulation being found in such a situation, contributing to immunological memory. SFE Pangioti et al, supra. However, if the immune system is overwhelmed and virus replication remains at a high level, this eventually leads to exhaustion of T cells and poor memory formation. Id. These and other insights are leading to a variety of different strategies for improving T cell-directed treatments, but many of these efforts are still in early stages. Id.

[0014] Still another challenge is the nature of the T cell response that is induced by a vaccine or immunotherapy. Until recently, it was believed that induction of CD8+ cytotoxic T lymphocytes was sufficient to provide protective memory in immunized animals, however, recent work suggests that CD4+ memory T cells may play an important role in such processes. (Zander et al. 2019 https://doi.org/10.1016/j.immuni.2019.10.009; Ahrends et al. 2019 https://doi.org/10.1038/s41467-019-13438-1).

[0015] One new immunotherapy approach directed to overcoming such issues is the use autologous vaccines; however, such methods are very expensive, such that the perceived return on investment of such approaches is low, and treatment may be prohibitively expensive in many contexts, such as in the immunization of non-human animals. Obtaining sufficient samples for effective autologous treatment is also a significant limitation (SFE Sondak V K et al. Clin Cancer Res. 2006; 12(7 Pt 2):2337s-2341s. doi:10.1158/1078-0432.CCR-05-2555), and even overcoming such issues there has been very limited success to date with such approaches (SFE Hollingsworth et al. NPJ Vaccines. 2019; 4:7. doi:10.1038/s41541-019-0103-y).

[0016] Another approach that has received significant recent attention as a potential improvement over traditional vaccines is CAR-T therapy. However, practical applications of such therapies, while promising, also appear to remain limited to blood cancers (SFE Ramachandran M. et al. Semin Cancer Biol. 2017; 45:23-35. doi:10.1016/j.semcancer.2017.02.010), and the technology is both very complex and very expensive, making it likely impractical for widespread application or application in the treatment of non-human animals.

[0017] Still another potentially significant breakthrough over the last few decades has been the development of recombinant “nucleic acid vaccines,” which typically are in the form of viruses or plasmids containing nucleic acid sequences encoding for one or more antigens. However, despite a huge number of disclosures in patent documents, and several actual clinical trials, to date no DNA vaccines have been approved for human use and only two have been approved for veterinary use (protection against West Nile Virus in horses and treatment of canine melanoma) (Hobernik and Bros, “DNA Vaccines-How Far From Clinical Use?”, Int J Mol Sci. 2018 November; 19(11): 3605 (doi: 10.3390/ijms19113605). Hobernik and Bros indicate that the impeded development of DNA vaccine approaches to immunotherapy appears to be attributable to the fact that while nucleic acid vaccines known to date have been able to evoke detectable levels of cellular and humoral responses in the clinic, such responses have not been sufficient to elicit actual clinical benefits. In Manickan et al., “DNA Vaccines—A Modern Gimmick or a Boon to Vaccinology?”, Crit Rev Immunol. 2017; 37(2-6):483-498. doi: 10.1615, the authors, after reviewing uses of DNA vaccines since 1993, similarly question the efficacy of DNA vaccines, concluding “It seems doubtful if DNA vaccines will replace currently effective vaccines . . . ”

[0018] Given these facts, in recent years there has been a significant focus on “DNA vaccine optimization strategies.” As summarized by Hobernik and Bros, these numerous approaches to improve DNA vaccines focus on optimization of promoters, optimization of antigens (e.g., codon optimization), inclusion of amino acid sequences that stimulate the immune system (e.g., A/T-rich sequences, CpG oligonucleotide sequences); and co-administration with various adjuvants (e.g., cytokines) or enhancers (e.g., signaling adaptors and/or transcription factors). Li and Petrovsky, review a similar list of strategies under research for potentially improving the efficacy of DNA vaccines which include use of novel plasmid vectors, codon optimization to enhance antigen expression, new gene transfection systems or electroporation to increase delivery efficiency, use of protein or live virus vector boosting regimens to maximize immune stimulation, and formulation of DNA vaccines with traditional or molecular adjuvants. Expert Rev Vaccines. 2016; 15(3):313-29. doi: 10.1586/14760584.2016.1124762.

[0019] Specific examples of such improvements include use of hybrid viral/eukaryotic promoters; use of expression systems optimized for antigen-presenting cell (“APC”) expression; use of codon optimization; use of linkers to separate antigens; use of nuclear localization signals (NLSs) to facilitate nuclear entry of the DNA (SFE Dean et al., Gene Ther. 2005 June; 12(11): 881-890, doi: 10.1038/sj.gt.3302534 and Bai et al., Biosci Rep. 2017 Dec. 22; 37(6): BSR20160616, doi: 10.1042/BSR20160616); fusion protein constructs with a MHC Class II invariant chain sequence; co-administration of expression vectors encoding factors that enhance APC activation and/or T cell attraction/polarization; Inclusion of intrinsic inhibitory elements (e.g., insertion of A/T-rich sequences), and inclusion of additional adjuvant (e.g., cytokine); or secondary sequences encoding such factors, which often are designed as a polycistronic construct by incorporation of polycistronic-enabling factors, such as an IRES (internal ribosome entry site) sequence and/or 2A self-cleaving peptide sequence (e.g., P2A, T2A, E2A, or F2A) (SFE Pelletier et al, Nature. 1988 Jul. 28; 334(6180):320-5, Jang et al. J Virol. 1988 August; 62(8):2636-43, Ibrahimi et al., Hum Gene Ther. 2009 August; 20(8):845-60. doi: 10.1089/hum.2008.188; and Kim et al., PLoS One. 2011; 6(4):e18556. doi: 10.1371/journal.pone.0018556. Epub 2011 Apr. 29). Understanding that antigens are processed in antigen-presenting cells (“APCs”) in the proteasome, one approach that has been proposed is to use proteasome-targeting sequences (e.g., ubiquitin “tags”) to direct antigen/tag “fusion” proteins/peptides expressed from nucleic acid vaccines (SFE US Patent Publication No. US20020058021). However, no single approach appears to have overcome the shortcomings associated with 1^{st} generation DNA vaccines.

[0020] Another recent relevant insight concerning the effectiveness of immunotherapy and vaccination is that checkpoint inhibition may have been the cause of at least some of the clinical ineffectiveness of T cell-directed vaccines for cancer and viruses developed in the 1990s and 2000s. Understanding checkpoint regulation of the immune system has led to the development of new classes of products (e.g., modulators of CTLA4, PD-1, and PD-L1), particularly in the treatment of cancer (SFE Naidoo et al., Hematol Oncol Clin North Am. 2014 June; 28(3):585-600. doi: 10.1016/j.hoc.2014.02.002, Haanen and Robert, Prog Tumor Res. 2015; 42:55-66. doi: 10.1159/000437178. Epub 2015 Sep. 4, and Dine et al., Asia Pac J Oncol Nurs. 2017 April-June; 4(2): 127-135. doi: 10.4103/apjon.apjon_4_17, each discussing early checkpoint inhibitor breakthroughs, and Kourie et al., Immunotherapy. 2017 June; 9(8):647-657. doi: 10.2217/imt-2017-0029, discussing new areas of checkpoint inhibition research and development). However, while checkpoint blockade is universally effective against a broad spectrum of cancer types and is mostly unrestricted by the mutation status of certain genes, only a minority of patients achieve a complete response. SFE Li et al., Curr Med Chem. 2019; 26(17):3009-3025. doi: 10.2174/0929867324666170804143706. All checkpoint inhibitors used in human therapy to date are monoclonal antibodies. Also, different checkpoint inhibitors exhibit markedly different physiological effects, and most major checkpoint inhibitors are associated with relatively high levels of immunological adverse events. El Osta et al., Crit Rev Oncol Hematol. 2017 November; 119:1-12. doi: 10.1016/j.critrevonc.2017.09.002.

[0021] Recently several patent publications have reported on combinations of checkpoint inhibitors, antigens, and immunostimulators to design more effective immunostimulators. WO2017177907, for example, describes recombinant proteins comprising an immune checkpoint molecule segment, an auxiliary T cell epitope segment, and an immunostimulatory molecule segment. U.S. Pat. No. 9,474,717 is directed to DNA constructs, delivered with calcium phosphate nanoparticles, comprising an immunomodulatory element, such as a checkpoint inhibitor (e.g., PDL1), which is sometimes combined in disclosed embodiments with targeting or immunostimulatory elements. WO2018140890 similarly discloses nucleic acid constructs encoding a checkpoint inhibitor (e.g., PD-L1, PD-L2), targeting factors, immunomodulatory elements (e.g., cytokines), and antigens. WO2019071032 similar discloses nucleic acid constructs comprising checkpoint inhibitor sequences, immunomodulatory sequences, targeting factors, and multiple antigen-encoding sequences.

[0022] As noted above, herpes glycoprotein D (gD) proteins have been a target of study in vaccine development (where gD is used as an antigen), including more recently in the context of DNA vaccines. However, many gD vaccines also have been ineffective (one recent report indicating that the use of CpG oligonucleotide adjuvants may address previous failings of gD vaccines. Hensel et al., Journal of Virology April 2017, 91 (9) e02257-16; DOI: 10.1128/JVI.02257-16). U.S. Pat. No. 9,795,658 teaches a different approach to improve gD immunogenicity by introducing stabilizing agents into DNA vaccines encoding gD proteins, such as PEST sequences (short half-lived sequences rich in proline, glutamic acid, serine and threonine, optionally flanked by amino acids comprising electropositive side chains) or ubiquitin sequences. Australian Patent Application AU2005202233 and US Pat. Pub. No. 2002/0058021 teach a different approach, in which gD, gB, or gC-encoding sequences are combined with rabbit intron sequences and a tPA signal sequence in a DNA vaccine in which gD is used as an antigen for treatment of pets and other animals.

[0023] Glycoprotein D is an envelope glycoprotein found on Herpes simplex viruses such as HSV-1 or HSV-2 and is expressed in cells infected by the viruses. Glycoprotein D also is a receptor-binding glycoprotein of herpesviruses. In general, the gD ectodomain is organized in two structurally and functionally differentiated regions. The amino-terminus includes the signal sequence and receptor-binding sites, and the carboxy-terminus includes the pro-fusion domain and the transmembrane domain. HSV-1 gD interacts with two primary receptors belonging to unrelated protein families, the Herpes Virus Entry Mediator (HVEM—aka, HveA, TNFR14) and nectin-1 (aka, HveC).

[0024] Structurally, HSV-1 gD contains a core domain with a variable-type immunoglobulin fold (IgV, residues 55 to 185). HSV-1 gD also has an estimated 23-to-25-amino acid amino-terminal signal sequence and a carboxy-terminal transmembrane domain. The signal sequence is typically cleaved in the mature form of the protein. An N-terminal flexible region, located at residues 26-46, forms a hairpin structure that binds HVEM. The C-terminal end of the protein, residues 255-394 appears to be involved with viral cellular entry, and residues 255-340 are also flexible in nature. The area defined by about residues 360-310 is considered the profusion domain (PFD), which is required for viral infectivity and fusion but not for receptor binding. A transmembrane domain is located around residues 341-361/363 and a topological domain is located from residues 362-394. HSV-1 gD also comprises a number of N-linked glycosylation sites (e.g., at residues 119, 146, and 287) and two other O-linked glycosylation sites. HSV-1 gD and other gD proteins, such as PRV gD, comprise three internal cysteine-cysteine (cys-cys) disulfide bonds (in HSV-1 these are located between residues 91-214, 131-227, and 143-152).

[0025] Other HSV gD homologs have been identified in numerous alphaherpesviruses including Marek's Disease Virus (MDV) gD (also known as Gallid alphaherpesvirus 2 (GaHV-2), which infects chickens; pseudorabies virus (PRV), which infects swine; bovine herpesvirus glycoprotein D; canine herpesvirus gD; and equine herpesvirus gD, among others. Although level of sequence identity between such homologs are relatively low (e.g., about 23%), there are overlaps in function between members of this protein family, even from different viruses, including competition for the same receptors (e.g., nectin-1). SFE Connolly S A, Whitbeck J J, Rux A H, et al. Glycoprotein D homologs in herpes simplex virus type 1, pseudorabies virus, and bovine herpes virus type 1 bind directly to human HveC (nectin-1) with different affinities. Virology. 2001; 280(1):7-18. doi:10.1006/viro.2000.0747. Even among alphaherpesviruses that infect the same species there are significant differences in terms of sequence identity, suggesting that even sequences with differences in composition may retain/exhibit somewhat similar functioning. For example, HSV-2 gD exhibits more than 65% amino acid sequence identity to HSV-1 gD and is generally structurally similar to HSV-1 gD, despite having an ectodomain that is shorter by one residue and binding affinity for nectin-2 (HVeB). There are similar levels of compositional differences between sequences of bovine herpesvirus gD proteins.

[0026] Researchers from the Wistar Institute have previously invented, researched, and published extensively on nucleic acid constructs that use gD/antigen fusion proteins as a vehicle for antigen delivery (see, U.S. Pat. No. 8,962,816 (“the '816 patent”), which resulted from International Patent Application WO/2008/027394, which was published in June of 2008, which claims priority to a provisional application filed in 2006). Expression of nucleotide sequence constructs described in the '816 patent reportedly results in one or more antigens being contained in a fusion protein containing an antigenic sequence inserted into the C-terminus (most broadly between residues 230-300) of a full length, truncated, or modified (mutated) gD protein which retains the ability to interact with HVEM and possibly exhibit other gD functions (SFE col. 8, lines 59-67) (alphaherpesvirus gD proteins are known to bind several other receptors across several species and even operate differently in different cell/tissue types (SFE Milne et al., Virology. 2001; 281(2):315-328. doi:10.1006/viro.2000.0798), although cross-species binding is reduced or sometimes non-existent and binding does not always lead to viral-cell fusion (Id. and see also, e.g., Connolly et al., Virology. 2001; 280(1):7-18. doi:10.1006/viro.2000.0747, Eisenberg et al., Viruses. 2012; 4(5):800-832. doi:10.3390/v4050800 and Menotti et al, Virology. 2001; 282(2):256-266.). Unlike vaccine approaches, however, the '816 patent highlights the importance of the gD protein to interact with the HVEM cell receptor and to disrupt the HVEM-BTLA pathway, and thus act as a checkpoint inhibitor. The '816 patent specifies that the antigenic sequence of such a construct is fused directly to an N-terminal gD amino acid and also to a C-terminal gD amino acid (SFE col. 8, lines 11-25) and the experimental data reported in the '816 patent indicates that the inventors perceived this configuration of the fusion protein to be important to the relatively enhanced immunogenic properties of such proteins as compared to corresponding antigen-only constructs.

[0027] Although the '816 patent makes some reference to a variety of possible antigens that can be contained in such a gD fusion protein-expressing construct, the '816 specifically exemplifies the use of only two types of gD fusion proteins. The first construct comprised an HIV gag antigen embedded within the gD sequence. The second construct comprised an antigenic sequence that comprised a combination of apparently directly fused HPV E5/E6/E7 oncoproteins or just the E7 oncoprotein. A third construct, at least designed to express a GD fusion protein comprising Thrombospondin-related anonymous protein (TRAP) “from parasite Plasmodium falciparum and Myco bacterium tuberculosis epitope string (TB) without their start and stop codons are incorporated into the HSV-1 gD NarI site, which corresponds to amino acid 288 in the gD mature form,” was specifically described, but not tested.

[0028] The two above-described tested constructs of the '816 patent were administered to cells and animals as both plasmid and adenoviral constructs. While both types of vectors were sometimes able to induce an immune response (including a memory immune response lasting at least one year), the adenoviral vector constructs outperformed the plasmid vectors in most cases; in some cases the plasmids were deemed non-immunogenic (SFE col. 34, lines 19-23); and the researchers ultimately appear to have envisioned that adenoviral vectors would be a required part of a clinical trial program (albeit possibly aided by initial plasmid immunization, a course that does not appear to have been employed in later related work).

[0029] The experiments reported in the '816 patent reflect that T cell responses were induced by these constructs in a variety of different models and that, at least in some cases, measurable B cell (humoral) responses could also be induced for at least some of these constructs (e.g., vectors expressing the gD-gag fusion protein (SFE Example 9)). Some of the gD fusion protein constructs described in the '816 patent, however, did not result in a measurably enhanced immune response when tested (SFE Example 10), indicating that the specific gD/antigen/vector combination may be determinative of clinical efficacy, though the amount of guidance the '816 patent provides on this point is limited. As such, while the '816 patent demonstrated that gD fusion proteins can sometimes aid in inducing a B cell or T cell immune response to an incorporated antigen, the successful application of such a strategy to any particular gD: fusion protein context will continue to require ingenuity. Furthermore, no effort was made to measure innate immune responses, however, or to include separate sequences for simultaneous induction of different arms of the immune system in the '816 patent.

[0030] Both around the time that the priority application for the '816 patent was filed and thereafter, the named inventors of the '816 patent (Hildegund Ertl, Marcio O. Lasaro, and Luis Ferreira) authored several published papers detailing experiments either corresponding to or similarly including gD fusion protein-expressing nucleic acid constructs (either as DNA vaccines or adenoviral vectors) containing multiple HIV or HPV antigens, usually involving 2-4 dosages of such constructs and corresponding measurements of T cell or both T cell and B cell responses in mice, typically reflecting improved immune responses, which the researchers consistently attribute to gD:HVEM binding and to placement of antigens within gD as described in the '816 patents. SFE Lasaro et al., Microbes and Infection 7 (2005) 1541-1550 and Lasaro et al., Nature Medicine. Vol. 14(2): 205 (2008); and Lasaro et al. (2009), supra).

[0031] An extension of this work described in Santana et al., PLoS ONE 8(8): e71322. doi:10.1371/journal.pone.0071322 (2013), reviewed the use of bicistronic plasmid vectors encoding two different gD fusion proteins with antigens from HPV, HIV, and Herpes Simplex Virus (HSV), with 20% of mice treated with one such vector remaining tumor free and 60% developing a therapeutic response against transplanted tumor cells. The authors noted that the multi-cistron approach led to a more balanced and efficient T cell response, but that there may have been differential expression from the two cistron construct of the different fusion proteins. The authors also emphasized the perceived importance of gD membrane localization to such T cell effects.

[0032] In 2014 Dr. Ertl and colleagues published a paper detailing experiments involving the initial and booster administration of gD fusion protein-expressing adenoviral vector constructs comprising the Epstein-Barr virus nuclear antigen 1 (EBNA-1) in Rhesus Macaques. Although the researchers saw a marked increase in EBNA-1 specific CD8 and CD4 cells receiving the gD:EBNA-1 fusion protein-expressing construct, the differences in animals receiving the fusion protein treatment versus just the antigen were “too subtle to clearly demonstrate an effect of HSV gD,” despite the previously obtained results with different constructs in mice. While the researchers also did not detect a difference in T cell response between animals administered a HVEM-binding vs. non-HVEM-binding form of gD, also contradicting early work with gD fusion protein-expressing constructs, the authors nonetheless noted that “only animals that received the vaccine with [HVEM] binding gD developed increased CD8EM responses that were significantly larger” than responses with an unrelated antigen-only administration.

[0033] In additional follow-on research conducted by Dr. Ertl, a nucleic acid sequence encoding a combination antigen named “Melapoly” (comprising unspecified spacer-separated sequences of CD4+ and CD8+ T cell epitopes of melanoma-associated Ags (MAAs) including tyrosinase-related protein (Trp)-1, Trp-2, gp100, and mutated BrafV600E linked to the universal Th cell epitope PADRE, and an endoplasmic reticulum (“ER”) targeting signal sequence) was inserted into a gD-encoding sequence in the manner of the '816 patent constructs, and the sequence was delivered to and expressed in animals in a mouse melanoma model via chimpanzee adenoviral vectors similar to those used in the '816 patent (Zhang Y and Ertl C J (2014). The Effect of Adjuvanting Cancer Vaccines with Herpes Simplex Virus Glycoprotein D on Melanoma-Driven CD8+ T Cell Exhaustion. J. Immunol. 193(4): 1836-46). This research found that the gD-Melapoly fusion protein was able to induce T cell immune responses, however the response was not always clearly stronger than that achieved with immunization of antigen alone. What the researchers noted, however, was that the results of the reported experiments indicated that such a gD-T cell antigen construct might be capable of inducing a more effective T cell response in animals under a condition of T cell exhaustion, which results from continued antigen stimulation of T cells in chronic viral diseases (e.g., lymphocytic choriomeningitis virus, HIV, and HCV infection) or related (“subsequent”) cancers. The authors also highlighted the focus of these products on stimulating only CD8+ T cells as an advantage of such GD fusion protein constructs (see p. 1845, right col., second full paragraph).

[0034] Experiments involving gD:Melapoly-expressing adenovirus nucleic acid constructs are also described in U.S. Pat. No. 9,744,424 (to Ertl and Zhang). The '424 patent further discloses the combined uses of adenoviral vectors of gd:Melapoly-encoding adenoviral vectors with fibroblast activation protein (“FAP”)-encoding adenoviral vectors, either concurrently or in a prime boost administration strategy. The '424 patent provides structural information relating to the Melapoly multi-antigen sequence, reflecting that it contains three CD4+ T cell epitopes and eight CD8+ T cell epitopes from four melanoma associated antigens (see Cols. 21-22) separated by unspecified “conventional linker sequences” (presumably alanine-alanine spacer sequences). While significantly enhanced CD8+ T cell responses were reported to be induced in mouse tumor model animals treated with the gD:Melapoly-expressing adenoviral vectors, the composition failed to cure mice completely, especially in mice with advanced tumors (see col. 24, lines 15-22). Results were improved when the two different adenoviral vectors were co-administered. The addition of the FAP-expressing vector appears to have resulted in detection of T cells to FAP epitopes, a significant increase in certain cytokine associated T cells, and a low antibody response at the highest level of vector administration.

[0035] Additional related work has been more recently developed by researchers from the Wistar Institute, including Dr. Ertl, in collaboration with the original applicant for this patent application, MBF Therapeutics. One set of these experiments, described in Kurupati et al., Cancer Immunol Immunother. 2018 October; 67(10):1533-1544. doi: 10.1007/s00262-018-2201-5, evaluated the ability of adenoviral vector comprising a DNA sequence encoding one of two canine cancer antigens (tyrosine-related protein 1 (Trp-1) or canine tyrosine-related protein 2(Trp-2)) in a gD fusion protein to generate T cell immune response in dogs. Kurupati et al. indicated that the selected adenoviral vector was used because of its own very high immunogenicity. A T cell response was observed for the Trp-1/gD adenoviral constructs in dogs (immune responses for the Trp-2/gD constructs were not measured). Otherwise, the work reported in Kurupati et al did not expand on the teachings of the '816 Wistar Patent.

[0036] In still another set of even more recent experiments supported and/or performed by the same entities (MBF and Wistar), an adenoviral vector comprising an AGDFPES construct similar to those described in the '816 patent, but encoding a fusion protein called K9Melapoly that comprised a combination of five predicted immunogenic amino acid sequences (comprising a set of predicted T cell epitopes from both Trp-1 and Trp-2 canine melanoma tumor-specific antigens along with human cancer-related immunogenic proteins tyrosinase, gp100, and MAGE-A1, in a fusion protein along with gD domains, where the antigenic sequences were separated by alanine-alanine (“AA”) spacers, apparently similar to the approach taken in Zhang and Ertl, supra). This work is described in a currently unpublished patent application. The work described in that patent application concludes that the GD-K9Melapoly fusion protein-encoding adenoviral vector was able to induce CD8+ T cell responses. In some respects, the vaccine also exhibited CD4+ effects, but in other cases such effects were described as “marginal” or “low,” which the researchers attributed to the selection of epitopes that target MHC Class I molecules. Three dogs tested with the vaccine produced certain, robust CD8+ T cell responses, but almost a similar number of dogs (2) were considered low responders. CD4+ responses, as noted were low or, at best, comparable with respect to only CD95+CD4+ cells. The tested and in-detail described construct was not designed to induce humoral, innate/adaptive, or innate immune responses, and, accordingly, such responses were not measured in the study.

[0037] Despite the promising results reflected in the '816 patent and various related publications and patent documents, in the over eleven year period since the publication of corresponding International Patent Application WO/2008/027394 the development of gD fusion protein treatments for cancer or viral diseases has remained remarkably slow and limited, with no known human clinical trials of such products initiated yet, and few publications directed to research involving such constructs other than those cited in this disclosure.

[0038] There additionally remains several potential issues associated with the successful development of these and similar types of products for clinical application. In particular, despite significant advances in the understanding of T cell biology in recent decades, T cell vaccine products have often failed to result in clinically meaningful responses. For example, Gilbert, Immunology. 2012 January; 135(1): 19-26. doi: 10.1111/j.1365-2567.2011.03517.x, reports “Although many ways of inducing T cells by vaccination have been assessed, the majority result in low level, non-protective responses” and only one on-market vaccine as of 2012 was thought to work primarily through T cell immunity. Even using multiple-antigen viral vector vaccine constructs developed by leading pharmaceutical company Merck have failed to deliver results in phase II clinical studies. Id. Results with adenovirus, pox virus, and a few other viral vectors have appeared more promising than with DNA vaccines to date. Id. However, as acknowledged by even the '816 patent, viral vector-based immunization approaches can be associated with immune responses, rendering such products unsuitable for therapeutic application. For example, as reported in Gilbert, 2012, supra, in cancer clinical trials involving viral vectors expressing p53 as the antigen, immune responses were directed against the viral vector rather than p53 in the majority of patients.

[0039] Despite the extensive amount of research reported on in the Wistar Art, relatively few other researchers have studied or reported on biotechnology applications of gD fusion proteins or related constructs. US Patent Publication No. 20030236396, which names a group of inventors apparently associated with University of Lausanne, University of Pennsylvania, and leading healthcare company Becton Dickinson, describes generation of truncated HSV gD polypeptides (e.g., comprising AAs 1-337 of HSV-1 gD), and noting the ability of such polypeptides to promote glycosylphosphatidylinositol (GPI) anchoring, secretion, and other properties. Most of the '396 application's disclosure focuses appears on the use of such gD sequences for the development of polypeptide expression products, which can be cleaved away from the gD sequence after expression. Although Examples 12 and 13 describe gD fusion protein constructs these appear to have been made to demonstrate the secretion-promoting abilities of such gD sequences, as Example 13 is focused on the cleavage of gD from the non-gD portion. Example 14 discloses prophetic use of constructs encoding such gD sequences in the context of restorative gene therapy, but no examples or disclosure are provided describing or suggesting the use of such constructs as vaccines or immunogenic agents. As such, the '396 application appears directed to a fundamentally different approach than the Wistar Art. It is also noteworthy that the '396 application also was abandoned prior to any substantive examination, no related patent applications were filed, and no related publications appear to exist in the literature, suggesting that these institutions did not view such ideas to be promising enough to be developed further or that the actual results associated with the specific constructs did not work as intended.

[0040] Other reports of gD fusion proteins in the literature have been primarily, if not exclusively, focused on understanding the basic biology of gD/HSV, rather than in the development of compounds for use as vaccines or immunotherapeutic agents (Zhou and Roizman. 2007. PNAS USA. 104:4142-4146. 10.1073/pnas.0611565104; Zhou et al. 2002. Proc. Natl. Acad. Sci. U.S.A. 99:15124-15129. 10.1073/pnas.232588699; & Menotti et al. 2008. J. Virol. 82:10153-10161. 10.1128/JVI.01133-08).

[0041] Complicating the predictability of gD related constructs further is fact that much of the research actually conducted with gD fusion proteins to date has been in mice and a growing body of scientific research has demonstrated that success with one treatment in one species is often not able to be successfully extended to other species, and this is particularly true in the case of translating mice data to larger animals such as dogs, horses, pigs, cows, primates, and humans. SFE Akhtar, Camb Q Healthc Ethics. 2015 October; 24(4): 407-419 doi: 10.1017/S0963180115000079. Mak et al. report that successful translation from animal models to human data in cancer treatment, specifically, has been less than 8%, which the authors attribute in part to the prevalent use of mice models. Am J Transl Res. 2014; 6(2): 114-118. Hayden, 2014, Nature News (available at https://www.nature.com/news/misleading-mouse-studies-waste-medical-resources-1.14938). The challenge of translating success in mice to other animals has already demonstrated to have occurred with gD fusion protein-expressing constructs in at least one case, as noted by Ertl et al. (2014), supra. As such, the efficacy of such constructs in other animals remains unclear, and this is especially true in the case of animals such as pigs and cows in which HVEM does not appear to be expressed by native cells.

[0042] From the foregoing it can be seen that while there have been many recent discoveries in connection with the development of novel vaccines, the predictability of success in therapeutically modulating immune systems with new nucleic acid vaccine constructs in larger animals or people, even when such new constructs are somewhat similar to those that have exhibited immunogenicity in vivo in several mice studies (as in the case of gD fusion protein-expressing constructs), still often remains relatively low and outcomes with existing approaches may be surprisingly more limited than desired. As such, the successful development of products that can improve on the performance of those constructs already known in the art, and new applications of such existing or new products in existing or new therapeutic or prophylactic applications, will often still require the application of inventive ingenuity.

### Principles of Construction & Associated Abbreviations

[0043] These principles should be consulted in interpreting this disclosure.

[0044] Any heading(s) here (e.g., “Principles of Construction & Associated Abbreviations”) are used for convenience and should not be construed to limit the scope of the invention. Except where clearly otherwise indicated, aspects of the invention described in part or entirely under a heading can apply to other aspects described in other sections of this disclosure.

[0045] Unless expressly otherwise indicated, description of terms known in the art is for exemplifying versions or embodiments only; and is not intended to limit the scope of any aspect of the invention. Unless defined otherwise, all technical and scientific terms used herein have the same meanings as commonly understood by one of ordinary skill in the art and implicitly comprise the broadest interpretation based on such usage as well as any narrower interpretation(s) based on specific descriptions provided here. In general, any methods and materials similar or equivalent to those described herein can be used in the practice or testing of embodiments of the invention, the methods, devices, and materials described herein.

[0046] The inclusion of “(s)” after an element indicates that ≥1 of such an element is present, performed, and the like. E.g., a composition comprising NAM(s) comprising NS(s) means a composition including one or more NAMs collectively (and possibly also individually) comprising one or more NSs.

[0047] For sake of conciseness symbols are used wherever appropriate. E.g., “&” is used for “and” and “˜” is used for “about.” The indicator “+” is sometime combined with a value to indicate “more than” (e.g., “1+ NAM” means “one or more NAMs”). The symbols > and < are given their ordinary meaning (e.g., >1 means “greater than 1”, <2 means “less than 2,” e.g., >2 NAMs means “more than two NAMs”). Similarly, the indication “<” means “less than or equal to” and “≥” means “equal to or more than.” A slash “/” can indicate “or” (A/B means A or B) or can indicate an element with 2 names.

[0048] The abbreviation “WRT” means “with respect to.” “ACB” in connection with steps/elements means “are characterized by” (e.g., methods ACB steps) and “CB” is used to abbreviate the phrase “characterized by.” “AW” means “associated with.” ACA means “are characterized/characterizable as” and ICA means “is characterized/characterizable as.”

[0049] Ranges of values are used to concisely refer to each value falling within the range within an order of magnitude of the endpoints of the range without having to explicitly write each value. For example, a recited range of 1-2 should be interpreted as implicitly disclosing each of 1.0, 1.1, 1.2, 1.3, 1.4, 1.5, 1.6, 1.7, 1.8, 1.9, and 2.0 and a recited range of 10-20 is to be interpreted as implicitly providing support for each of 10, 11, 12, 13, . . . 19, and 20). All recited ranges include the end points of the provided range, regardless of how the range is described, unless the exclusion of such endpoints is clearly indicated, regardless of the terminology used to describe the range. For example, a range between 1 and 5 will include 1 and 5 in addition to 2, 3, and 4 (and all numbers between such number within an order of magnitude of such endpoints and within such endpoints, in this example 1.1 and 4.9).

[0050] Terms of approximation, such as “about” or “approximately” are sometimes used to conveniently refer to a range of closely related values or where a precise value is difficult to measure or a precise measurement is difficult to define. Unless otherwise stated, all exact values provided herein are representative of corresponding approximate values and vice versa (e.g., all exact exemplary values provided with respect to a particular factor or measurement can be considered to also provide a corresponding approximate measurement, modified by “about,” where appropriate—e.g., disclosure of “about 10” is to be understood as also providing support for 10 exactly). Ranges described with one or more approximate numbers should be interpreted as indicating that all endpoints and other relevant values encompassed by the range may be similarly described, regardless of any different presentations included in this disclosure (e.g., “about 10-20” should be interpreted in the same manner as “about 10-about 20”). The scope of value modified by a term of approximation will depend on the context of the disclosure or understanding of those skilled in the art. In the absence of such guidance, terms such as “about” should be understood as meaning+/−10% of the indicated value(s).

[0051] Lists of elements are sometimes employed for conciseness. Unless indicated, each member of each list of aspects or features should be viewed as an independent aspect of the invention. Each such aspect can have and often will comprise nonobvious properties with respect to the other listed elements.

[0052] The terms “a” and “an” and “the” and similar referents are to be construed to cover both the singular and the plural, unless otherwise indicated herein or clearly contradicted by context. Terms in the singular implicitly convey the plural and vice versa herein, unless clearly contradicted by context or plausibility (e.g., a passage referring to use of a “composition” implicitly discloses corresponding use of corresponding “compositions,” and vice versa).

[0053] Terms such as “here” & “herein” means “in this disclosure” unless otherwise indicated. The abbreviation “TD” similarly means “this disclosure.” The term “i.a.” (sometimes “ia” or “ia”) means “inter alia” or “among other things.” “Also known as” is abbreviated “aka.” “ORT” means “otherwise referred to.” The modifier “OTI” means “of the invention.” “AOTI” means “aspect(s) of the invention.” “ATAOTI” means “adaptable to” AOTI(s). “PMCs” means “principles, methods, or compositions.” “ITA” means “in the art.” “KITA” means “known in the art.” “POOSITA” means “person of ordinary skill in the art.” “DEH” means “discussed elsewhere here.” “DFEH” “means “discussed further elsewhere herein.” “CEH” means “cited elsewhere herein.” “EH” means “elsewhere herein.” “SFE” means “see, for example.”

[0054] In the absence of other definition or understanding ITA, the term “some” WRT elements of a method or composition means “two or more” & WRT a part of a whole means “at least 5%” (i.e., ≥5%). The abbreviation OSMGAOA means “one, some, most, generally all (i.e., at least 75%), or all,” each of which is an independent aspect of the described feature.

[0055] Fragments of abbreviations provided here are given the meaning of the presented parts of the abbreviation. E.g., “OSMOA” means “one, some, most or all” and “GAOA” means “generally all or all.” Abbreviations provided in this disclosure are often combined, e.g., “WRT OSMOA” means with respect to one, some, or all and the abbreviations “EP” (“expression product”) and “ES” (“encoding sequence”) are parts of the combined abbreviation “EPES” meaning “expression product encoding sequence.”

[0056] The modifier “DOS” means detectable or significant/detectably or significantly. “Significant” means results that are statistically significant using an appropriate test in the given context (e.g., p:0.05/0.01).

[0057] “AAW” means “associatively applied with.” A composition or method is AAW another method/step or composition/element when the application results in DOS enhanced clinical effects, physiological effects, and the like. AAW can comprise co-administration/application, sequential administration/application, or both, 1+ times.

[0058] Use of the term “or” herein is not meant to imply that alternatives are mutually exclusive unless clearly stated or clearly contradicted by context. Thus, in this disclosure, the use of “or” means “and/or” unless expressly stated or understood by one skilled in the art. The occasional explicit use of “and/or” herein has no effect on this interpretation of “or.” The scope of “or” meaning “and/or” in a phrase such as “A, B, and/or C” implicitly supports each of the following embodiments: A, B, and C; A, B, or C; A or C; A or B; B or C; A and C; A and B; B and C; A (alone); B (alone); and C (alone). The term “also” means “also or alternatively” (abbreviated “AOA”) unless expressly stated.

[0059] Terms such as “combination,” “and combinations,” or “or any combinations” WRT listed elements means combinations of any or all thereof. The abbreviation “CT” means any and all possible “combination(s) thereof.”

[0060] Terms such as “including,” “containing,” and “having” should be interpreted openly herein, e.g., as meaning “including, but not limited to,” “including, without limitation,” or “comprising,” unless the description clearly states otherwise. Comprising means including any detectable amount of an element or including any detectable performance of a step. Description of an aspect “comprising” or “including” a step or an element should be interpreted as AOA including that element/step (with any other steps/elements or alone).

[0061] Unless clearly contradicted, a description of any AOTI using terms such as “comprising” or “including” with reference to a step/element simultaneously implicitly discloses corresponding AOTIs that (1) consists of (“CO”) of the step/element (or “only is”), (2) consist(s) essentially of the step/element, (3) substantially consists of (“SCO”) the step/element (or “substantially is” or “substantially only” is/are the step/element), (4) generally consists of (“GCO”) the step/element (or is “generally adapted” to, is “generally composed” of, “generally is,” “generally only” is/are, “generally are,” the element, and the like), (5) predominately comprises (“PC”) (“mostly” or “primarily” comprises) the step/element, (6) materially comprises (“MC”) the step/element, and (7) appreciably comprises (“AC”) the step/element.

[0062] The phrases “consists of” (abbreviated “CO”) & “consists essentially of” are well understood in patent disclosures given their ordinary meaning here.

[0063] “Substantially consists of” (“SCO”) means ≥95% of the referenced class is made up of the referenced element and “substantially associated” means that at least 95% of a referenced item are associated with a second referenced item. “Substantially all” means at least 95% of the referenced items/steps meet(s) the indicated condition.

[0064] Phrases such as “generally consists of” (abbreviated “GCO”), “generally is,” “generally are,” “generally all,” “generally,” or “generally is composed of” means the referenced element makes up 75%+ of the related whole. Similarly, the phrase “generally associated” means ≥75% of an element is associated with a 2nd referenced item (e.g., ≥75% of 1 agent is associated with a 2nd agent). Phrases such as “generally most” and “generally all” mean ≥75% of the referenced items/steps meet the indicated condition.

[0065] “Predominately comprises” (abbreviated “PC”) means that detectably greater than 50% of the composition is composed of the referenced element/component and “predominately associated” is construed similarly.

[0066] “Materially comprises” (“MC)” means ≥5% of the composition/component is made up of the subject element/component. The phrase “materially associated” is similarly construed. The phrase “in material part” means ≥5% of the referenced items/steps meet the referenced condition.

[0067] The phrase “appreciably comprises” (abbreviated “AC”) means at least 1% of the composition is composed of the referenced element/component. The phrase “appreciably associated” means that at least one percent of an element is associated with another referenced element.

[0068] Changes to tense or presentation of terms (e.g., using “comprises predominately” in place of “predominately comprises”) should not be interpreted as modifying the meaning of the related phrase unless indicated.

[0069] Abbreviations for these terms are used here and combined for sake of conciseness. For example, the phrase “a composition MCPCGCOSCO or CO element X” is used to describe compositions that (1) materially comprise element X, (2) primarily comprise element X, (3) generally consist of element X, (4) substantially consist of element X, or (5) consist of element X. Similarly, a passage that refers to “compositions that PCGCO or SCO element y” provides support for compositions that primarily comprise, generally consist of, or substantially consist of element Y.

[0070] Although some elements may be described in terms of a “means for” performing a function or a “step for” performing a method, no element of this disclosure should be interpreted as indicating a “means-plus-function” construction unless such intent is clearly indicated by use of the terms “means for” or “step for.” Terms such as “configured to” or “adapted to” are not intended to suggest a “means-plus-function” interpretation, but, rather, indicate an element is configured to, designed to, selected to, or adapted to achieve a certain performance, characteristic, property, or the like using the principles described herein and/or that are generally known in the art.

[0071] Unless otherwise indicated, compositions specifying a percentage are by weight unless a different value would be understood ITA. If a variable is not accompanied by a value, any previously provided value typically applies.

[0072] All described methods can be performed in any suitable order unless otherwise indicated or contradicted by context/plausibility. Unless contradicted, elements of a composition can be assembled in any suitable manner by any suitable method. Unless contradicted, any combination of elements, steps, components, and/or features of aspects of the invention and all possible variations thereof, are within the scope of the invention.

[0073] Numerous examples of aspects are provided in this disclosure to illuminate such parts of the invention. The breadth and scope of the invention should not be limited by any of the exemplary embodiments. No language in the specification should be construed as indicating any element is essential to the practice of the invention unless such a requirement is explicitly stated.

[0074] All references, including publications, patent applications, and patents, cited herein, are hereby incorporated by reference to the same extent as if each reference were individually and specifically indicated to be incorporated by reference and were set forth in its entirety herein. The disclosure of such documents relating to compositions and methods can be combined with the teachings provided herein to provide additional useful compositions and applications. However, the citation and incorporation of patent documents herein is limited to the technical disclosure of such patent documents and does not reflect any view of the validity, patentability, and/or enforceability of any claims thereof. Moreover, in the event of any conflict between this disclosure and the teachings of such documents, the content of this disclosure will control with respect to properly understanding the various aspects of the invention. Numerous references have been included in this disclosure to incorporate information available from other sources that illustrate the scope of the invention or aid in putting aspects of it into practice. While efforts have been made to include the most relevant references for such purposes, readers will understand that not every aspect of every cited reference will be applicable to the practice of the invention.

### I. Additional Terms and Abbreviations

[0075] The following description of terms and listing of abbreviations is provided to assist readers of this disclosure in understanding the invention. This disclosure is not intended to limit the scope of any terms ordinarily understood in the art. As such, any description of such terms should be considered to refer to certain aspects and to exemplify the meaning of the referenced term. Additional terms and abbreviations are provided in other parts of this disclosure (e.g., “related” and “similar” with respect to AARSs), are well known in the art (e.g., DNA), or both (e.g., CpG, MHCI, and MHCII).

[0076] A “biomolecule” here typically means a composition comprising, PC, GCO, or CO a PPT or nucleic acid. In aspects, a biomolecule can include other molecules made by cells/synthetic counterparts, e.g., lipids & carbohydrates.

[0077] The term “inducing” means DOS inducing, promoting, or enhancing an event/outcome, such as IR(s) (generally), particular IR(s) (e.g., ITIC IR(s)) or T cell IR(s)), or CE(s), e.g., reduction of symptom(s). “Enhancing” comprises increasing the magnitude, scope, duration, or other characteristic, typically of another event or composition. Promoting means increasing the likelihood of occurrence, frequency of occurrence, and the like.

[0078] Terms such as “block,” “inhibit,” or “reduce” herein with respect to IR(s), CE(s), checkpoint pathway(s), or other physiological or cellular processes means reduces, attenuates, stops, makes less likely, or prevents as dependent on context—e.g., a biomolecule that “blocks” a checkpoint pathway reduces, inhibits, or stops such a checkpoint pathway from its typical operation in the given context). Both such effects (inducing and reducing) mean at a detectable level and implicitly comprise at a statistically significant (“significant”) level. Antigenic PPTs (Ags) are typically not IMs/PIMs and are not Adjuvant(s). While Ags induce IR(s), IMs and adjuvant(s) induce IR(s) generally and are not associated with a DCA. Thus, typically, GAOA Ags and PIMs are not-related, are heterologous, and are distinct in functions (e.g., CEP Ags inducing Ag-specific IR(s) and PIM(s) inducing generalized IR(s)). In aspects, Ags can be PIMs and vice versa. As such, in some AOTIs Ag(s) are PIM(s) & in many AOTIs SMGAOA Ag(s) in CEPs are not PIM(s).

[0079] The modifier “peptidic” means composed of an expressible AARS. E.g., a peptidic CI (PCI) is a checkpoint inhibitor including AARS(s).

[0080] “CCEPM” means complementary clinical event promoting method. A CCEPM is a method that when AAW delivery of CCEPCs induces CEs. E.g., WRT treating cancer, CCEPMs include surgery or radiation therapy.

[0081] “CCEPC” means complementary clinical event promoting composition. CCEPCs are compositions that induce CEs when AAW CEPESCs, including vaccines, therapeutics, and medicaments that treat symptoms.

[0082] Phases such as “applied in association with,” AAW, delivered in association,” or “administered in association” mean delivery or administration of 2+ methods, steps, compositions, or combinations in any suitable manner(s), including, unless clearly contradicted, co-administration and sequential administration, repeated administration or application, and the like. “Delivery” or “administration” implicitly means delivery/administration of an “effective amount” (“EA”) (an amount that effectively induces IR(s) in a TR, in a population of TR(s) (e.g., determined through 1-3 clinical trial(s), or both (whether reference to EA(s) is made or not). Terms like “deliver” refer to the transfer of a composition (e.g., a CEPESC) to a physiological site, tissue, cell, or to/into a TR. “Delivery” encompasses delivery to the intracellular portion of a cell or extracellular space(s). Delivery of a NAM into the intracellular portion of a cell is ORT as “transfection.” Delivery and administration are often used synonymously here. Description of elements of compositions herein, unless contradicted, also are implicitly to be understood as being present in EA(s).

[0083] The modifier “EL” means “entire length” and is used to refer to WT biomolecules, such as WT PPTs. E.g., an EL HSV-1 gD means AAs 1-394 of HSV-1 gD. The “EL” modifier can also refer to a domain (e.g., a gDRBD).

[0084] An immunomodulator (“IM”) is a composition that modulates IR(s) (e.g., that induces IR(s) or block/inhibit IR(s) in a non-Ag specific manner.

[0085] Unless otherwise indicated, PPTs described WRT a WT protein, class of proteins, etc., encompass both PPTs CO the AARS of the reference protein(s) and also FPs comprising the AARS and heterologous AARS(s). E.g., an “EAT-2 PPT” provides simultaneous support for PPTs that both (1) have an AARS consisting of a WT EAT-2 sequence (which may be an entire WT EAT-2 PPT or a FF) or a FV and (2) that comprise any such sequence and additional AARS(s).

[0086] Two sequences (nucleotide or AA), such as 2 sequences in a single recombinant molecule that have different origins, compositional characteristics, or both, can be described as being “heterologous” relative to each other and, conversely, sequences that share such origin(s) or compositional characteristics are “homologous.” In WT PPTs and NAMs, origin is the sole determinant of homology herein. Origin in such respects refers both to genes and gene products. Homologs include PPTs recognized as homologous ITA based on functional, structural, and compositional characteristics (e.g., human EAT-2 and murine EAT-2; PRV gD and HSV-1 gD; canine influenza HA and human influenza HA; etc.). However, with respect to variants (FVs), compositional similarity to a WT biomolecule is the determinant of homology. For example, a FP comprising a FV of a human EAT-2 and a variant of a HSV-1 gD would be heterologous given that each AARS is related to PPTs from different species.

[0087] The term “exogenous” can be used to indicate a referenced molecule or the referenced activity that is introduced into a non-native context, such as the introduction of a nucleic acid molecule (e.g., a plasmid) into a non-native cell or host. An exogenous nucleic acid molecule can be introduced to a cell, for example, by introduction of an encoding nucleic acid into the host genetic material such as by integration into a host chromosome or as non-chromosomal genetic material such as a plasmid. The term “endogenous” is usually used to refer to a referenced molecule or activity that is present or typically present in a context, such as in a cell, a tissue, or a TR.

[0088] The term “construct” means a recombinant NS and typically is used synonymously with expression product encoding sequence (EPES).

[0089] The abbreviation RVRHRSII means “related, very related, highly related, substantially identical, or identical” with respect to two NSs or AARSs. RVRHRSI is construed similarly except for excluding identical sequences. Functional variant (“FV”) sequences ACA RVRHRSI or, in the case of FV AARSs both RVRHRSI & SVSHSSCE to WTC(s). “SVSHSSCE” means similar, very similar, highly similar, or substantially compositionally equivalent.” Identity/relatedness and similarity of sequence(s) is defined by optimally aligning sequence(s) using a tool such as BLAST, LALIGN, or CLUSTAL using appropriate settings. “Related” means at least 70% identical, VR means ≥80% identity; HR means ≥90% identity or no more than 2 differences in composition in sequences with less than 10 components; SI means ≥96% identical or no more than 1 difference in sequences with less than 1 component. Description of a “related” sequence also implicitly discloses corresponding AOTI CB VR, HR, or SI WRT the related sequence. Similar (“S”) AA sequences exhibit ≥75% AARS similarity; VS AARSs are 85% similar; HS AARSs are 92% similar; and SCE AARSs are ≥98% similar. Such AOTI are DFEH. “MCRT” means “most closely related to,” which is defined in terms of relatedness unless specified. References to FFs & FVs apply to any preceding sequences in a sentence. Thus, e.g., a “PPT, FF, or FV” means the EL PPT, FFs of the PPT, and FVs of the EL PPT or any of the FFs of the PPT.

[0090] FVs and FFs can exhibit suitable, comparable, or improved function(s) in the counterpart WTC sequence/biomolecule (PPT/NAM). “Comparable” functionality WRT to measurable functions means functionality that is not significantly different than the counterpart or that is within +/−20% of the WT function. “Suitable” functionality means exhibit (sometimes ORT as retaining) function(s) such that the function DOS exhibit(s) the result of the function (e.g., DOS induction of IR(s)). In aspects, “suitable” functionality means at least 50% of the function of the WT counterpart. “Improved” functionality (improvably functional) means DOS improvements in function(s).

[0091] Terms such as “treat” generally mean to DOS reduce, stop, inhibit, alleviate, or ameliorate, the underlying cause of physical symptoms of DCAADs, and encompass, as AOTI, “curing” a DCAAD (eliminating detectable indication(s) of the DCAAD in TR(s)). Terms like “prevent,” “prophylaxis,” “immunize,” and “vaccinate” mean to induce IR(s) that are DOS protective in TR(s) when subsequently challenged with an associated DCA and encompass reduction in the likelihood of acquiring, duration, extent, or severity of a DCAAD, each as an AOTI complete prevention (lack of detectable disease). Other facets of AOTI CB treatment or prevention of DCAADs are DEH.

[0092] The descriptor “anti-” herein typically means blocking, reducing, reversing, or diminishing. E.g., an “anti-cancer composition” is a composition that has one or more of such effects on a cancer condition in TRs. In connection with Abs and ligands, “anti-” is used to describe an Ab/ligand that binds (and typically specifically binds) to a referenced target.

[0093] In AOTI, molecules, such as polypeptides and nucleic acid molecules of the invention ACA being “isolated” nucleic acids. For example, in methods described below, clinically relevant antigens are “isolated” from expression products or clinically relevant antigen-encoding nucleic acid molecules or nucleotide sequences are “isolated” from a disease-causing agent's genetic material/information (or portion thereof), such as from an ORF contained in a viral genome. Isolation in this respect is a concept that is understood in the art and the art is replete with methods for isolating biomolecules, such as nucleic acid sequences (e.g., by hybridization) and peptides (e.g., by affinity chromatography, ELISA, SDS-PAGE, and the like). The term “isolated” with respect to a nucleotide sequence usually refers to a polynucleotide that is not immediately contiguous with both of the coding sequences with which it is normally immediately contiguous (on the 5′ end, on the 3′ end, or both). Isolated polynucleotides include recombinant polynucleotides maintained in heterologous host cells or purified (partially or substantially) polynucleotides in solution. Isolated RNA molecules include in vivo or in vitro RNA transcripts of the polynucleotides of the present invention. Isolated polynucleotides or nucleic acids according to the present invention further include such molecules produced synthetically.

[0094] The following table lists abbreviations that are frequently used in this disclosure and provides a description of the meanings/scope thereof:

| Abbreviation | Term | Brief Description |
|---|---|---|
| AA/AAR | Amino acid/ | Any amino acid expressible from a NS in |
| | AA residue | a TR |
| AAC | Associative applied | A composition that is AAW CEPESC(s) in |
| | composition | methods OTI. AACs can be CCCs and |
| | | vice versa. As such, examples of each |
| | | are interchangeable unless contradicted. |
| AARS | Amino acid residue | A sequence of amino acid residues; part |
| | sequence | or all of a PPT |
| Ab | Antibody | Any type of antibody. Typically, Ab |
| | | fusion proteins (AbFPs) are described |
| | | separately |
| AE | Adverse events | Events reportable as adverse events WRT |
| | | applicable US FDA regulation(s) |
| Ag | Antigen | An AARS/PPT that induces an antigenic IR |
| | | with respect to DCA(s) |
| AgES | Antigen-encoding | A NS encoding antigen(s) (Ag(s)) |
| | sequence | |
| AgV | Antigen variant | A variant of a WT antigen that is suitably, |
| | | comparably, or improvably antigenic |
| aHV, αHV, | Alpha-herpesvirus | Term either used to refer to biomolecules |
| or a-HV | | from viruses in this family or FFs/FVs that |
| | | are related to such EL WT biomolecules |
| BC | B-cell | Antibody producing cells comprising a |
| | | BCR. and classified as B cells |
| BCE | B-cell epitope | An epitope recognized by a BC |
| CaPNP | Calcium phosphate | Any type of Ca phosphate nanoparticle |
| | nanoparticle | that promotes transfection of NAVs |
| CC | Combination | A composition comprising CEPES NAM(s) |
| | composition | and one or more CCC(s) |
| CCC | Combination | A component of a CC that enhances IR(s) |
| | composition | associated with the CEPESC or induces |
| | component | IR(s) or CE(s) not induced by the CEPESC |
| CE | Clinical effect | A clinically relevant effect in TR(s) - e.g., |
| | | reduction in frequency, delay of onset, |
| | | reduction in severity, increase in cure, |
| | | reduction of symptoms, or other |
| | | favorable change(s) in clinical indicator(s) |
| | | (at an individual or population level, |
| | | generally or dependent on context) |
| CEP | Combined | All PPT(s) expressed from EPES(s) of a |
| | expression | CEPESC |
| | products | |
| CEPES | Combined EP ES(s) | The NS(s) encoding a CEP |
| CEPESC | Complete EP ES | A composition comprising all referenced |
| | composition | EPES(s), associated NAM(s), and other |
| | | components (e.g., CaPNP(s)) |
| CI | Checkpoint inhibitor | A molecule that acts as a checkpoint |
| | | inhibitor in TR(s). A “PCI” is a PPT CI. |
| CM | Checkpoint | A molecule that modulates a checkpoint |
| | modulator | pathway in TR(s). |
| COE | Cell(s) of | Cells in which CEPESC(s) are expressed |
| | expression | |
| CP | Checkpoint | A term given its ordinary meaning ITA |
| | pathway | |
| CPCR | Checkpoint | A cell receptor that forms part of a |
| | pathway cell | checkpoint pathway |
| | receptor | |
| CPRL | CP receptor ligand | A ligand for a receptor in a CP (note, |
| | | often CPCRs are CPRLs and vice versa, |
| | | e.g., WRT “self-ligand” CPRLs) |
| CPSTAP | CP signal | An adaptor protein that modulates |
| | transducing | member(s) of a checkpoint pathway |
| | adaptor protein | |
| CRA | Clinically relevant | An AARS/PPT that exhibits DOS CE(s) in |
| | antigen | a relevant context proven through clinical |
| | | testing in TR(s) or a population of TR(s) |
| CS | Coding sequence | A PPT-encoding NS, expressible in TR(s) |
| CSAE | cytokine syndrome | Cytokine-associated AE(s) including |
| | AE(s) | cytokine storm effects, cytokine |
| | | syndrome AEs, & Vaccine-Associated |
| | | Enhanced Respiratory Disease (“VAERD”) |
| CSM | Co-stimulatory | A molecule that induces a stimulatory |
| | molecule | checkpoint, e.g., an ICRL of a co- |
| | | stimulatory ICR (a concept known ITA) |
| CTL | Cytotoxic T | A modifier associated with cytotoxic |
| | lymphocyte/CD8 | action(s) of CD8 T cells or an associated |
| | | IR, such as a T cell cytotoxic IR |
| DC | Dendritic cell | Cells recognized as DCs by POOSITA |
| DCA | Disease-causing | A pathogen, cancer/cancer cell, or other |
| | agent | disease-causing agent treatable through |
| | | induction of an effective antigenic IR |
| DCAAD | DCA associated | A disease/condition AW a DCA, injurious |
| | disease | or potentially injurious to TR(s) |
| DCR | DC receptor | A receptor expressed on dendritic cell(s) |
| DCUF | DC uptake | A modifier associated with AARSs that |
| | facilitating | DOS facilitate DC uptake of associated |
| | | AARS(s) in FPs. The modifier “UF” means |
| | | “uptake facilitating” and can be applied to |
| | | other cells, e.g., ICUF means “immune |
| | | cell uptake facilitating” |
| DIV | De-immunization | A variation that reduces the |
| | variation or variant | immunogenicity or antigenicity of a |
| | | PPT/AARS in a TS or a FV of a PPT |
| | | comprising such a variation |
| EEI | Expression | An intron that enhances the expression of |
| | enhancing intron | associated CS(s) |
| EP | Expression product | A PPT expressed from an NS in a CEPESC |
| EPES | EP encoding | A NS encoding EP(s). EP and ES are |
| | sequence | associated with other terms (e.g., PCIES |
| | | means a PCI encoding sequence). |
| EPESNAM(s) | EPES NAM(s) | NAM(s) of a composition (EPESC) |
| | | comprising EPES(s) |
| ES | Encoding sequence | A NS sequence that encodes a PPT or |
| | | AARS. E.g., a gDPES is a NS that |
| | | encodes a gDP |
| ETS | Extracellular | An AARS that targets a referenced target |
| | targeting sequence | expressed externally to/on cell(s) (e.g., a |
| | | receptor on cell(s)) |
| FF | Functional | A fragment of a PPT or NS that exhibits a |
| | fragment | detectable function that is suitable |
| | | comparable, equivalent, or superior to |
| | | the corresponding function of the |
| | | whole/parent PPT or NS; the term |
| | | ‘fragment” refers to the fact that the FF |
| | | contains only a portion of the |
| | | whole/parent PPT or NS. FFs typically are |
| | | not made by fractionation. |
| FL | Flexible linker | A linker that is at least 33% composed of |
| | | glycine residues |
| FP | Fusion protein | A protein comprising two or more |
| | | heterologous AARSs, typically that each |
| | | exhibit distinct DOS functions |
| FV | Functional variant | A variant that is at least related to a |
| | | referenced sequence and exhibits |
| | | suitable, comparable, or improved |
| | | functionality in one or more respects to a |
| | | WT counterpart |
| gD | Glycoprotein D | An abbreviation for an EL WT |
| | | glycoprotein D protein (gDP) of an |
| | | alphaherpesvirus or a modifier used to |
| | | refer to gD-related PPTs/AARSs |
| gDAgFP | gD: Antigen fusion | A fusion protein comprising one or more |
| | protein | functional alphaherpesvirus glycoprotein |
| | | D sequences and one or more antigen |
| | | sequences |
| gDD/gDS | Glycoprotein D | An AARS of a gDP, a functional fragment |
| | domain/sequence | thereof, or a variant of either thereof |
| gDP | gD polypeptide | a PPT comprising gDS(s) |
| gDSS | gD signal sequence | An AARS that functions as a gDSS, |
| | | typically a WT gDSS, a FF of such a |
| | | AARS, or a FV of either |
| GSRAgV | Glycosylation site | A variant Ag in which potential or actual |
| | removal Ag variant | glycosylation sites, are removed. |
| | | Implicitly includes NLGSRAgVS (N-linked |
| | | glycosylation site removal Ag variants). |
| GSRV | Glycosylation site | FV(s) of AARS/PPT(s) where ≥1 known or |
| | removal variant | expected glycosylation sites are removed/ |
| | (variation) | a modifier referring to such variations. |
| | | Implicitly discloses NLGSRV(s). |
| IC | Immune cell | Any cell of the immune system, including |
| | | innate immunity cells, adaptive immunity |
| | | cells (e.g., T and B cells), and innate |
| | | trained immunity cells (DCs and NKCs) |
| ICITM | Immune cell | An ITM that significantly, primarily, |
| | internal target | generally, or only exhibits effects in ICs |
| | modulator | |
| ICR. | Immune cell | A receptor that is abundantly expressed |
| | receptor | on ICs and when modulated induces IRs. |
| ICRL | Immune cell | A ligand for an ICR |
| | receptor ligand | |
| ICSTAP | Immune cell STAP | A STAP that significantly, primarily, |
| | | generally or only exhibits effects in ICs |
| | | (e.g., a DAP-12 PPT) |
| IM | Immunomodulator | A compound that DOS modulates IR(s) |
| IR | Immune response | Any DOS immune response in TR(s) |
| IRV | Immunodominance | A variation in an Ag that reduces |
| | reduction variation | immunodominance |
| ISNS | Immunostimulatory | A NS that is inherently |
| | nucleotide | immunostimulatory, such as an |
| | sequence | immunostimulatory CpG sequence |
| ITIC | Innate trained | A cell of the innate trained immune |
| | immune cell | system, such as NKCs and DCs |
| ITICITM | ITIC internal target | A PPT that modulates activity of an |
| | modulator | internal target in ITICs |
| ITICR and | ITIC receptor and | Receptors and ligands of ITICs, |
| ITICRL | ITICR. ligand, | respectively |
| | respectively | |
| ITICSTAPs | ITIC signal | STAPs that modulate ITIC ICRs, e.g., SAP |
| | transducing | and EAT-2 |
| | adaptor proteins | |
| ITIPIMs | Innate Trained | Peptidic immunomodulator(s) that |
| | Immunity Peptidic | predominantly, generally, substantially, |
| | Immunomodulators | or only induce significant IRs in ITICs |
| ITM/ITIM | internal target | A PPT that DOS modulates a target |
| | modulator or IT IM | biomolecule present in a cell's interior |
| ITS | intracellular | An AARS that targets a referenced |
| | targeting sequence | intracellular target (e.g., an organelle, a |
| | | PPT in the nucleus or other organelle, or |
| | | an internal portion of a receptor) |
| MgDS and | Modified gDS and | A non-WT gDS that is not described in |
| MgD | modified gD, | the Wistar Art such as a gDS that exhibits |
| | respectively | significantly reduced HVEM binding, |
| | | significantly preferred binding for a non- |
| | | HVEM receptor, or both; (2) comprises |
| | | GSRV(s); (3) or a combination thereof. A |
| | | MgD is a gDP comprising MgDS(s). |
| MHCIE | MHCI epitope | An epitope AW MHCI presentation |
| MHCIIE | MHCII epitope | An epitope AW MHCII Ag presentation |
| MSFL | Mid-sized flexible | A linker ≥4 AARs in length and ≥33% |
| | linker | composed of Gly residues |
| MSL | Mid-sized linker | A linker of at least 4 AARs |
| NAM | Nucleic acid | A type of a nucleic acid molecule in a |
| | molecule | CEPESC. Typically, each NAM is present |
| | | in significant copies (e.g., ≥ 1 MM copies) |
| NASM | Non-antibiotic | A selection marker that is not an |
| | selection marker | antibiotic resistance marker |
| NAV | Nucleic acid vector | A nucleic acid vector |
| NFP | Non-fusion protein | A PPT comprised of an AARS of or that is |
| | | RVRHR or SI to a single WT PPT |
| NGD or NgD | “Non-gD” | A modifier used to describe an AARS or |
| | | PPT that is heterologous to a gDS (not a |
| | | gDS or a related variant of a gDS). E.g., |
| | | a NgDICRL is a non-gD ICRL and a NgDCI |
| | | is a non-gD checkpoint inhibitor |
| NGDICRTS | Non-gD ICR | An ICR TS heterologous to gDRBDs |
| | targeting sequence | |
| NHA | Non-human animal | TR(s) other than human beings |
| NDISTR | Non-DCA | TR(s) not in a state of checkpoint |
| | immunosuppressed | immunosuppression at the time of |
| | target recipient | CEPESC administration |
| NKC | NK cell | A natural killer cell |
| NLGSRV and | N-linked GSRV and | Variations/FVs in which N-linked |
| NLGSRAgV | N-linked | glycosylation sites are removed through |
| | glycosylation site | substitution or deletion of AAs. NLGS |
| | removal AgV | means “N-linked glycosylation site.” |
| NonCMIMP(s) | Non-Checkpoint- | PPT(s)/AARS(s) that are IM(s) and not a |
| or | Modulating | PCI, such as a Paj/cytokine |
| NCMIMP(s) | Immunomodulator | |
| | PPT(s) | |
| NS | Nucleotide | Sequences of nucleotide bases, such as |
| | sequence | DNA or RNA sequences |
| OCEP | Other composition | PPT(s) expressed from NS(s) in |
| | expression product | compositions other than CEPESCs |
| PAg/PCRA | Putative antigen/ | PPT/AARS predicted to be an Ag/CRA |
| | Putative CRA | |
| PAj | Peptidic adjuvant | An adjuvant that is a peptide or AARs |
| | | (e.g., a part of a FP), typically encoded |
| | | by ESs |
| PE | Polyepitope | A polyepitope sequence or a modifier |
| | | relating to such sequences (e.g., a NS |
| | | sequence encoding a PE) |
| PFD | Profusion domain | A profusion domain of a gDP (WT/FV/FF) |
| PIM | Peptidic | A PPT that is an immunomodulator |
| | immunomodulatory | |
| polyUb | Polyubiquitin | A term known ITA (ordinary meaning) |
| PPT | Polypeptide | A peptide, polypeptide, or protein, |
| | | including a multimeric peptide or protein |
| SCM | Stimulatory CM | A molecule acts as a CM that stimulates |
| | | immune system activity in a TR. |
| SCS | Self-cleavage site | A site acted on by a self-cleavage |
| | | element (e.g., a 2A PPT cleavage site) |
| SCUP | Strong constitutive | A promoter recognized as having all of |
| | universal promoter | these qualities in TRs, such as a CMV |
| | | promoter or a CAG promoter. |
| STAPM | STAP modulator | A PPT that modulates a STAP or STAP |
| | | pathway (e.g., a PPT that blocks a STAP : |
| | | ICR. pathway). E.g., an IC STAPM is a |
| | | PPT that modulates a STAP/STAP |
| | | pathway in an IC |
| TC | T cell | (self-explanatory/known ITA) |
| TCE | T-cell epitope | An epitope recognized by a T-cell |
| TFA | Transfection- | An agent associated with a vector, such |
| | facilitating agent | as a NAV, that promotes uptake of the |
| | | vector into cells, such as CaPNPs |
| TH | T-helper/CD4 | A modifier to indicate T-helper/CD4 T |
| | | cell or associated IR - a CD4/TH immune |
| | | response (e.g., a MHCII response) |
| TH17TCE | Th17 T-cell epitope | A TCE that primarily, generally, or only |
| | | induces Th17 cytokine responses in TR(s) |
| TH1TCE | Th1 T-cell epitope | A TCE that primarily, generally, or only |
| | | induces Th1 cytokine responses in TR(s) |
| TH2TCE | Th2 T-cell epitope | A TCE that primarily, generally, or only |
| | | induces Th2 cytokine responses in TR(s) |
| TMD | Transmembrane | An AARS that corresponds to or is a |
| | domain | variant of a WT transmembrane domain |
| | | of a PPT, such as a TMD of a WT gDP |
| TME | Tumor | The environment of cancer cells in and |
| | microenvironment | around a tumor including nearby non- |
| | | transformed cells and milieu |
| TR | Target recipient | Subject(s) intended to receive a |
| | | referenced CEPESC (e.g., a pig, a dog, a |
| | | horse, or a human). |
| TREGE | TReg epitope | An epitope that induces a TReg IR |
| TS | Targeting sequence | An AARS that binds a referenced PPT, |
| | | e.g., an ICR. E.g., a DCRTS is a DCR TS. |
| WT | Wild-type | A modifier used to identify a naturally |
| | | occurring form of a PPT, cell, NS, |
| | | biomolecule, organism, or the like. |
| WTC | Wild-type | A biomolecule/sequence that is a |
| | counterpart | referenced counterpart of a FF or FV. |
| | | Homologs also can be described as |
| | | “counterparts” of referenced biomolecules |

### SUMMARY OF THE INVENTION

[0095] This invention provides new methods and compositions for inducing IR(s) in TR(s) comprising the delivery of gDP(s) and Ag(s), typically through the delivery of CEPESC(s) comprising NAM(s) comprising NS(s) comprising gDPES(s) and AgES(s). Such methods are CB, i.a., (1) CEP(s) expressed from such CEPESCs comprising (a) novel Ag(s), Ag combinations, or AgV(s) (e.g., GSRAgV(s)), (b) Ag-associated TS(s) (e.g., ITS(s), e.g., PTPS(s), e.g., polyUb(s)), (c) PIM(s) (e.g., ITICITM(s)/ITICSTAP(s), (e.g., EAT-2 PPT(s)) or other PCM(s), e.g., trap proteins targeted to checkpoint pathway targets), (d) mGDS(s); or (e) CT; (2) NAM(s) comprising such CEPESs (a) comprising EEI(s); (b) being NAVs (e.g., mRNA NAV(s), mixtures of NAV(s), NAV(s) comprising NASM(s), etc.); or (c) being associated with TFA(s), e.g., CaPNP(s) that enhance/induce IR(s); (3) such TR(s) (a) being non-HVEM-expressing TR(s), (b) being TR(s) not undergoing active DCA immunosuppression through DCA-associated checkpoint modulation, (c) being at risk or undergoing a cytokine syndrome condition, (d) being treated with or at risk of treatment with a “leaky vaccine,” or (e) exhibiting a combination thereof. “Leaky vaccines” are known in the art as vaccines that do not provide sterilizing immunity and, accordingly, are associated with DOS enhanced spread over pathogen through populations and to other populations as compared to an effective/sterilizing vaccine due such effects (SFE Jin J et al. Biochem Biophys Res Commun. 2018; 496(3):846-851. doi:10.1016/j.bbrc.2018.01.141; Yu C et al. Vaccine. 2016; 34(50):6358-6366. doi:10.1016/j.vaccine.2016.10.044; and Trible B R et al. Virus Res. 2012; 164(1-2):68-77. doi:10.1016/j.virusres.2011.11.018 with respect to leaky vaccine effects in porcine circovirus (PCV) and Allen G P et al. “Equid herpesvirus-1 (EHV-1) and -4 (EHV-4) infections.” in Coetzer, J A W and Tustin, R C (Eds.), INFECTIOUS DISEASES OF LIVESTOCK. 2nd Edn. Oxford Press: Cape Town; 2004. pp. 829-859 concerning leaky vaccine effects in equine herpes virus (EHV)). Other such AOTI are FDEH. Another facet OTI is embodied in CEPESCs comprising NS(s), NAV(s), and TFA(s) as described above. Other facets relate to related compositions (EP PPTs and related compositions, cells comprising EPES(s), kits and packaged compositions, etc.), methods of production, related methods of use (e.g., use of CEPESCs comprising CC(s) or AAW CCEPC(s) or CCEPM(s).

[0096] In aspects, gDP(s) are gD fusion proteins (gDFPs) comprising gD AARS(s) (gDS(s) sometimes ODA gD domain(s) (gDD(s)) and heterologous AARS(s). In aspects, heterologous AARS(s) comprise Ag(s) (“Ag” here can be used to refer to NFP Ag(s) (e.g., endogenous Ag(s)) and to Ag(s) incorporated into FPs). Such gDFPs are referred to as gDAgFPs. In aspects, gdAgFP(s) comprise ITS(s) associated with Ag(s) (e.g., exosome TS(s), endoplasmic reticulum TS(s), etc.). In aspects, ITS(s) are proteasome targeting/processing sequence(s) (PTPS(s)). In aspects, PTPS(s) comprise polyUb(s). In aspects, gDAgFP(s) comprise Ag(s) downstream of any gDS(s) in the gDAgFP. In gDP(s), such as gDAgFP(s), gDS(s) can EL WT gDP(s) a FF or a FV thereof. In aspects, defined gDS(s) of gDP(s) exhibit 1+ defined function(s), such as gD receptor (gDR) binding, checkpoint inhibition, inducing ER processing, ensuring desired placement of other gDDs, etc. In aspects, a gDS is combined with 1+ heterologous gDS(s) to generate a chimeric gDS that exhibits such gD function(s) (e.g., a chimeric gDRBD that can bind gD receptor(s)). In aspects, FFs/FVs of gDS(s) or other referenced PPTs/AARSs/NSs exhibit suitable, comparable, or improved function(s) WRT to WTC(s).

[0097] In aspects, a gDS FF or gDVS exhibits suitable, comparable, or improved function(s). In aspects, a gDS FF/gDVS exhibits OSMOA of the functions of its WT counterpart. In aspects, a gDS FF or gDSVS exhibits <all functions of a corresponding WT AARS. Functions of gDS(s) include (1) gDSS functions; (2) receptor binding (e.g., nectin-1, nectin-2, or HVEM) (in gDRBD(s)) and target cell-binding (e.g., DCs, T cells, epithelial cells, or fibroblasts); (3) promoting uptake of the associated gDP (e.g., in a gDFP, such as a gDAgFP); (4) enhancing ER processing of the gDP; (5) enhancing GPI anchoring (6) membrane association (in a gD TMD); or (7) any other measurable function associated with gDD(s) or combinations of any such functions. As DEH, gDP(s) can include non-functional WT gD AARSs or FVs thereof, but such AARS(s) do not characterize the gDP unless explicitly stated. gDP(s) also can comprise gDD(s) that are not discussed in detail herein but that exhibit function(s) (e.g., gDP(s) can be CB inclusion of gDS(s) that DOS contribute or cause oligomerization/dimerization of gDP(s)).

[0098] In aspects, CEPs are CB ia (1) comprising a combination of gDP(s) and (2) PPT(s)/AARS(s) that are (a) ICITM(s) (e.g., ICSTAP(s)); (b) CPSTAP(s); (c) CP STAPM(s); (d) ITICITM(s) (e.g., ITICSTAP(s), e.g., EAT-2 PPT(s) or EAT-2 PPT(s)+ SAP PPT(s)); or (e) ITIPIM(s). In aspects, EP(s) are CB falling within 2+ of such categories of PPT(s) (e.g., an EAT-2 PPT typically is an ICITM, a CPSTAP, an ITICITM, and an ITIPIM).

[0099] In aspects, Ag(s) in CEP(s) are CB having certain feature(s), being associated with TS(s) (e.g., NGD TS(s)), or both. In aspects, OSMGAOA Ag(s) in CEPs comprise FF(s) or FV(s) of EL WT Ag(s) but that DOS induce IR(s). In aspects, OSMGAOA Ag(s) in CEPs comprise AgV(s). In aspects, OSMGAOA AgV(s) in CEPs comprise DIV(s), e.g., GSRV(s). In aspects, OSMGAOA AgV(s) comprise editope(s). In aspects, AgV(s) comprise removal of decoy epitope(s)/Ag(s), IRV(s), or combinations. In aspects, Ag(s) in CEPs comprise both MHCIE(s) and MHCIIE(s), the combination resulting in DOS CD4 TC, CD8 TC, and BC IR(s) in TR(s). In aspects, OSMGAOA Ag(s) in CEPs are in PE(s). In aspects, OSMGAOA Ag(s) are associated by FL(s), MSL(s), or MSFL(s). In aspects, OSMGAOA Ag(s) are associated with NGD TS(s). In aspects, such TS(s) are ITS(s). In aspects, such ITS(s) are PTPS(s), e.g., polyUb(s). In aspects, FP(s) in CEPs comprise SCS(s). In aspects, OSMGAOA Ag(s) are expressed in FPs, e.g., gdAgFP(s). In aspects, OSMGAOA Ag(s) in CEP(s) are expressed apart from gDP(s). In aspects, OSMGAOA Ag(s) are encoded by NAM(s) other than NAM(s) encoding a gDP or NAM(s) encoding ICITM(s), CPSTAP(s), ITICSTAP(s), or ITIPIM(s) In aspects Ag(s) comprise a mix of Th1/Th2/Th17 TCE(s) & other features (e.g., DIV(s)) that DOS reduce CSAE(s) in TR(s). In aspects, Ag(s) comprise CRA(s) or putative CRA(s) (PCRA(s)).

[0100] In aspects, NAM(s) of CEPESC(s) comprise EEI(s) AW OSMGAOA EPES(s). In aspects, NAM(s) comprise SCUP(s) AW OSMGAOA EPES(s). In aspects, CEPESC(s) comprise 2+ NAM(s) comprising different NS(s). In aspects, NAM(s) are NAV(s). In aspects, NAV(s) are mRNA NAV(s) or DNA NAV(s). In aspects, DNA NAV(s) are plasmids. In aspects, NAV(s) are AW TFA(s). In aspects, TFA(s) are CaPNP(s) that DOS enhance IR(s) in TR(s).

[0101] In aspects, CEPESCs are employed in new conditions of use (conditions of use not described in the Wistar Art). In aspects, CEPESC(s) are used to treat/prevent DCAAD(s) in TR(s) treated with or at risk of treatment with a leaky vaccine. In aspects, CEPESC(s) are used to treat/prevent DCAAD(s) in NDISTR(s). In aspects, CEPESC(s) are used to treat/prevent DCAAD(s) in TR(s) that are non-HVEM-expressing TR(s) (e.g., pigs). In aspects, CEPs comprise PCV Ag(s) and CEPESC(s) are used to treat/prevent other NHAs, humans, or CT. In aspects, CEPs comprise PRRSV Ag(s) and CEPESC(s) are used to treat/prevent PRRSV in pigs, other NHAs, or humans. In aspects, CEPs comprise ASFV Ag(s) and CEPESC(s) are used to treat/prevent ASFV in pigs, other NHAs, or humans. In aspects, Ag(s) comprise coronavirus (COV) Ag(s) and methods comprise treating/preventing COV in TR(s). In aspects, Ag(s) comprise influenza Ag(s) and methods comprise treating/preventing influenza in TR(s). In aspects, Ag(s) comprise a-HV Ag(s) and methods comprise treatment/prevention of a-HV diseases, such as EHV.

[0102] In aspects, Ag(s) comprise cancer Ag(s) (e.g., neoantigen(s), such as shared neoepitope(s), TAA(s), oncogene PPT(s), and the like). In aspects, methods comprise treatment of bladder cancer, lymphoma, or other cancer in TR(s) including companion animals (e.g., dogs, cats, horses), humans, or both.

[0103] One aspect is CEPESC(s) including EPES(s) encoding an EP comprising gDAgFP(s) and ICITM(s), e.g., ITICITM(s), e.g., ITICSTAP(s). In aspects, EPs comprise ITICSTAP(s) that comprise EAT-2 PPT(s)/AARS(s) or a combination of EAT-2 and SAP PPT(s)/AARS(s). In aspects, an EAT-2 PPT/AARS is a EL WT EAT-2 PPT (e.g., human EAT-2), a FF of a WT EAT-2, or a FV (e.g., a DIV of an EAT-2 AARS/PPT).

[0104] In aspects, Ag(s) of the EP are associated with ITS(s), such as PTPS(s), such as polyUb(s), e.g., SEQ ID NO:1.

[0105] Another AOTI is CEPESCs comprising an EA of EPESNAM(s) including EPES(s) encoding EP(s) comprising gDAgFP(s) & AgV(s). In aspects, OSMA of the AgV(s) are contained in gDAgFP(s). In aspects, OSMA of the AgV(s) are expressed as separate PPTs from the gDAgFP(s). In aspects, OSMA AgV(s) of the EP are GSRAGV(s) and in aspects OSMA of the GSRAgV(s) are NLGSRAgV(s). In aspects, other parts of the EP also comprise GSRV(s) (e.g., in the gDS or other possibly included aspects of the EP, such as, e.g., an ITII).

[0106] In aspects, NAM(s) comprise both EEI(s) & NASM(s). In aspects, CEPESCs comprise NAM(s) including (a) gDAgFPES(s) & (b) EEI(s) that DOS enhance gDAgFP expression (and in aspects DOS enhance gDAgFP-associated IR(s)). In aspects, the EPESNAM(s) also comprise SCUP(s), NASM(s), or CT. In aspects, EPENAM(s) are NAV(s), e.g., mRNA NAV(s) or plasmid DNA NAV(s).

[0107] An additional aspect is CEPESCs including EPES(s) encoding EP(s) comprising gDAgFP(s) comprising MgDS(s). In aspects, MgDS(s) exhibit DOS reduced affinity for HVEM (WRT to HSV gDs); comprise DIV(s), GSRV(s), or both; exhibit enhanced affinity for a non-HVEM receptor; lack a functional gD TMD; lack a PFD; or comprise CT. In aspects, a gDAgFP comprises Ag(s) positioned downstream of any gDS in the gDAgFP. In aspects, gDAgFP(s) comprise Ag(s) positioned between gDSs in gDAgFP(s). In aspects, a MgDS is a chimeric gDS, is MCRT to a WT gDP of a virus endogenous to NHAs, e.g., pigs, dogs, horses, or cows. In aspects, such CEPs include ICTIM(s), CPSTAP(s), ITIPIM(s), or ITICITM(s) (e.g., ITICSTAP(s), e.g., EAT-2 PPT(s)).

[0108] An AOTI is CEPESC(s) comprising EA(s) of NAV(s) comprising NS(S) including gDAgFPES(s) & (b) being associated with TFA(s), such as CaPNP(s), that DOS IR(s) in TR(s). In aspects, CEP(s) thereof comprise Ag-associated TS(s), e.g., ITS(s); MHCIE(s) and MHCIIE(s); AgV(s) such as GSRAgV(s); MgDS(s); or CT. In aspects, NAM(s) comprise EEI(s), NASM(s), or CT.

[0109] Another AOTI is CEPESC(s) comprising 2+ NAM(s), e.g., a first NAM comprising gDAgFPES and a second NAM comprising (a) an ISNS; (b) ES(s) encoding a 2nd type of gDAgFP, (c) ES(s) encoding ICITM(s), ICSTAP(s), CPSTAP(s), ITIPIM(s), ITICITM(s), or ITICSTAP(s) (e.g., EAT-2 PPT(s)); (c) ES(s) encoding NGDCI(s), NGDICRTSFP(s), NANCIPI(s) (e.g., cytokine(s)), AgFP(s) (e.g., a FP comprising AgV(s), a PEFP, or AgFP that is both), Ag(s), or other PIM(s); or CT. In aspects, one or both NAMs comprise EEI(s), are NAV(s) (e.g., TFA-associated NAV(s)), or both. In aspects, EP PPTs comprise Ag-associated ITS(s) (e.g., PTPS(s)), DIV(s), GSRV(s), or combinations. In aspects, such CEP(s) comprise Non-CIMP(s), e.g., cytokine(s) (e.g., Th1 cytokine(s), e.g., IFNg or IL-2) or PAj(s) (e.g., heat shock protein(s)).

[0110] Another aspect is a CEPESC comprising an EA of NAM(s) encoding a gDFPAg or other gDP and ≥1 NGDCI. In aspects, the NGDCI is a PD-1/PD-L1 CI or a CD112R CI. In aspects, NGDCI(s) comprise a multimeric ETS PPT that lacks antibody sequences (e.g., a PD-L1 or CDR112R trap protein). In aspects, gDS(s) of the CEPESC also act as CIs in TR(s). In aspects, the CEP also comprises AgV(s), Ag-associated ITS(s), MgDS(s) (e.g., non-HVEM binding gDP(s)), ICITM(s), CPSTAP(s), ITIPIM(s), ITICITM(s), ITICSTAP(s) (e.g., EAT-2 PPT(s)) or combinations. In aspects OSMA of the NAM(s) are NAV(s), e.g., TFA-associated NAV(s), e.g., CaPNP-associated plasmid(s).

[0111] In aspects, a CEPESC comprises an EA of NAM(s) comprising gDPES(s) and NGDICRTSFPES(s) (i.e., non-gD ICR TS FP ES(s)). In aspects, the NGDICRTSFP(s) comprise ITIC ICR TS(s). In aspects, the ITICICRTS(s) comprise DEC-205-TS(s). In aspects, the ITICICRTSFP is a multimeric PPT and the ITICICRTS(s) lack antibody (Ab) sequences (e.g., the ITICICRTSs are DCRTSs, e.g., DEC-205-binding keratin AARSs or variants). In aspects, the CEP comprises an ICITM, ICSTAP, CPSTAP, ITIPIM, ITICITM, or ITICSTAP, such as an EAT-2 PPT or AARS. In aspects, such a CEPESC is delivered to a TR that has pre-activated DCs (or the CEPESC comprises or is AAW activated DC(s)). In aspects, the NGDICRTSFP comprises Ag(s), such as AgV(s), and optionally ITS(s), such as PTPS(s), such as polyUB(s). A related aspect is a method of inducing IR(s) in a TR comprising delivering an EA of a CEPESC encoding a gDAgFP having any features described herein, and optionally (i) comprising ICITM(s), ICSTAP(s), CPSTAP(s), ITIPIM(s), ITICITM(s), or ITICSTAP(s) (e.g., EAT-2 PPT(s)) or (ii) being delivered AAW with delivering an EA of a NAM encoding ICITM(s), ICSTAP(s), CPSTAP(s), ITIPIM(s), ITICITM(s), or ITICSTAP(s) (e.g., EAT-2 PPT(s)), and in further AAW with delivering an EA of a composition comprising NAM(s) including NGDICRTSFPES(s).

[0112] An AOTI is CEPESCs that are CCs including 1 of any above-described or otherwise provided CEPESC features & comprising EA(s) of CCC(s) that DOS enhances IR(s) associated with CEPESC(s) or inducing IR(s) not induced by the CEPESC. In aspects, CCC(s) are vaccines. In aspects, CCC(s) are therapeutics. In aspects, CCC(s) are anti-pathogen or anti-cancer Abs. In aspects, CCC(s) are IC(s)(e.g., Ag- or IM-pulsed DCs, CAR-T cell(s), etc.).

[0113] AOTI include delivery of EA(s) of any of the above-described or otherwise provided CEPESCs of the invention to induce IR(s) in TR(s). In aspects, method(s) are performed to induce prophylactic IR(s) in TR(s). In AOTI, method(s) induce a therapeutic CE(s) in TR(s). In AOTI, method(s) are repeated 2 times (using the same or different CEPESC(s)). In AOTI, method(s) are AAW delivering EA(s) of CCC(s) or AAW CCEPM(s) or CCEPC(s).

[0114] Another AOTI is methods of inducing IR(s) in non-HVEM-expressing TR(s) comprising delivering an EA of CEPESC(s) to the non-HVEM TR one or more times. In aspects, the CEP comprises or PCGCOSCO or CO gDS(s) that exhibit DOS reduced HVEM binding in HVEM-expressing TRs. In aspects, the NS(s) encode a NASM. In aspects, the NAM(s) are TFA-associated NAV(s), such as CaPNP-associated DNA plasmids. In aspects, the CEP comprises NGDPCI(s). In aspects, the CEP comprises AgV(s), such as GSRAgV(s). In aspects, the TR is a pig and the CEP comprises Ags against PCV, PRRSV, or ASFV. In aspects, OSMA of the Ags of the CEP are associated with ITS(s), such as polyUb(s). In aspects, the EPESNAMs comprise EEI(s).

[0115] A further AOTI provides a method of inducing IR(s) against a leaky vaccine DCA, in TR(s) infected with a leaky vaccine DCA, or in TR(s) treated with a leaky vaccine effect vaccine comprising delivering to the TR(s) an EA of a CEPESC. In aspects, the leaky vaccine DCAAD is an influenza, EHV, or PCV.

[0116] Another AOTI is induction of IR(s) in TR(s) in NDISTR(s) comprising delivering EA(s) of a CEPESC to such TR(s) (e.g., a cancer patient). In AOTI, the Ag(s) of a CEP PCGCOSCO or CO pathogen DCA-associated Ag(s). In AOTI, such Ags comprise MHCIE(s) & MHCIIE(s), yet induce DOS BC, CD4 TC, & CD8 TC IR(s). In aspects, method(s) result in DOS numbers of Ag-specific ICs in TR(s) not present before delivery of CEPESC(s) (e.g., TCs, NKCs, or DCs)

[0117] A further AOTI is a method of inducing IR(s) comprising delivering EA(s) of CEPESC(s) 2 of the CEPESC(s) encoding different CEPs. In AOTI, a 1st CEPESC comprises a 1st gDAgFPES & a 2nd CEPESC comprises ES encoding (a) different gDAgFP(s); (b) NGDAgFP(s), e.g., an NGDICRTSAgFP; (c) Ag(s) (e.g., AgV(s), PE(s), or combinations); (d) ICITM(s), ICSTAP(s), CPSTAP(s), ITIPIM(s), ITICITM(s), or ITICSTAP(s) (e.g., EAT-2 PPT(s)); or (e) CT.

[0118] These and other AOTR are further described and exemplified in the following sections of this disclosure. Any of the features described in this Summary of the Invention can be combined and any such other features.

### DETAILED DESCRIPTION OF THE INVENTION

[0119] The invention described here provides new methods for inducing IR(s) in TR(s) comprising delivering EA(s) of CEPESC(s) comprising gDPES(s) and AgES(s), in 1, 2, or ≥2 NAMs & such CEPESCs. Some AOTIs are CB OSMA gDP(s) in the CEP of such constructs being gDAgFP(s). CEPESCs (compositions/constructs OTI) typically also comprise additional features, e.g., innate trained immunity peptidic immunomodulator(s) (ITIPIM(s)) or an internal target immunomodulator (ITI), e.g., immunomodulatory signal transducing activator protein (STAP) (e.g., an ITICSTAP, such as an EAT-2 PPT or an EAT-2 PPT and SAP PPT). Ag(s) of CEP(s) can be associated with ITS(s), such as PTPS(s), e.g., polyUb(s). Ag(s) also can be associated with DIV(s), such as GSRV(s). CEPESCs also can comprise MgDP(s). CEPESCs also can include NGDPCIM(s) (e.g., PD-L1 or CD112R trap proteins). CEPESCs can comprise non-viral vector NAVs with unique properties (e.g., growth in a triclosan selection system). CEPESC(s) often comprise 2+ NAVs comprising different NSs and often different ESs. NAVs of CEPESCs are often associated with TFAs, such as CaPNPs. EPES NAMs typically comprise EEI(s). The combination of SMGAOA of such elements provides CEPESCs advantageous properties lacking in compositions of the prior art, including gDFPES constructs of the Wistar Art. Methods of the invention provide new uses for such compositions that further enhance the applicability of such compositions in new ways, such as in the treatment of diseases in non-HVEM TR(s), in non-immunosuppressed TR(s), etc. These AOTI and more AOTIs are DEH.

[0120] Typically, CEPESCs are designed for use in ≥1 alphaherpesvirus infectable vertebrate target recipients (TRs). TR(s) can be any suitable type of such subjects. In aspects, TR(s) are associated with unique features, such as not expressing HVEM, having been previously treated with a “leaky vaccine,” not having a checkpoint inhibition immunosuppressed state, or CT.

[0121] To better illustrate various AOTI, a detailed discussion of the various components of CEPESCs, EPs/CEPs, and related methods of use, etc., follows, focusing on each component in turn. However, as illustrated in, i.a., the Summary of the Invention and Exemplary Aspects, such various elements are often or typically combined with other elements to arrive at the numerous types of various compositions and methods provided by the invention.

### I. Compositions

### A. NAMs. NSs. AARSs. & PPTs

[0122] CEPESCs comprise NAM(s) and methods OTI typically comprise the administration of NAM(s) to TR(s). NAM(s) of CEPESCs comprise 1+ nucleotide sequences (NSs) including EPES(s) and possibly other NS(s), e.g., EEIs.

[0123] Terms such as “nucleic acid molecule,” “nucleotide sequence,” “nucleic acid construct,” “nucleotide” or “polynucleotide” are closely related (and often can be used interchangeably), & KITA. Typically, terms such as “nucleic acid molecule” or “NAM” refer to a particular type (i.e., a particular copy) of a NAM in a composition or method. PHOSITA will recognize that the phrase “nucleic acid molecule” references a single type/copy of NAM, rather than a single molecule, as CEPESCs will, in actuality, typically comprise more than 100,000,000 and often more than 1,000,000,000 individual copies of any single type of NAM. Typically, NAM(s) & other agents in compositions/methods OTI are present in EA(s), and any disclosure of NAM(s) or related compositions (e.g., NAVs or other vectors) will be understood to disclose that the described compound(s) are present in effective amount(s). Such AOTI are DEH.

[0124] NAM(s) can comprise, PC, consist essentially of, SCO, or GCO 1+, often >1, >two, >three, >four, or more than five (e.g., 3-15, 4-12, 4-10, or 5-10) discrete NSs (sometimes referred to as functional nucleotide sequences (FNSs)) CEPESCs typically comprise NAMs comprising at least one gDPES.

[0125] In aspects, CEPESC(s) comprise only 1 NAM (e.g., a single type of plasmid or 1 type of mRNA). In other aspects, CEPESCs comprise ≥2 NAMs (e.g., 3, 4, 5 or more nucleic acid molecules, such as 2-20, 2-12, 2-10, 2-7, 2-6, 2-5, 2-4, or 2-3 NAMs). NAMs can be any suitable type of NAM, suitability WRT NAMs being typically determined by expressibility at a suitable/intended level and having other features suitable for clinical application as described here & DEH. In aspects, NAM(s) comprise, GCO, or CO RNA(s). In aspects, NAMs comprise, GCO, or CO DNA(s). In aspects, NAM(s) are single stranded. In aspects, NAM(s) are double stranded. Each NAM typically will be stable under typical expected conditions of use/storage (e.g., ≥6, ≥9, ≥12, ≥18, ≥24 months at RT (about 15-25/20° c., ambient (e.g., −50° C. to 50° C., −40° C. to 40° C., −35° C. to 35° C.), or accelerated stability temperature testing condition and humidity (per US FDA guidelines). Certain AOTI described further herein provide for CEPESCs having particular levels of stability of nucleic acid molecules. NAMs also will typically be non-toxic. In AOTI, NAM(s) are relatively non-immunogenic, not resulting in significant IR(s) in 1+ TR(s) (e.g., as determined by clinical trial). However, in other aspects NAM(s) are inherently immunogenic in CEPESCs (as is the case with some RNAs and ISNSs). NAM(s) and CEPESCs are typically sterile. NAMs exhibit transient expression of ESs contained therein and do not DOS integrate into TR genome(s) (i.e., delivering NAMs does not constitute restorative gene therapy).

[0126] The term “construct” is refers to NAMs comprising 2+ distinct NSs, which typically are heterologous and exhibit different/discrete and measurable function(s) (e.g., an NS comprising Cytomegalovirus (CMV) EEI, two or more Ag encoding sequences obtained from a canine cancer cell, and intervening sequences encoding either a SCS from another virus (e.g., a T2A SCS from asigna virus 2A), an artificial linker sequence, or both). The terms construct and CEPESC are used interchangeably here when referring to EPES constructs.

[0127] Unless otherwise indicated references to virus species generally, such as CMV, provide support for species of such viruses that infect humans and viruses recognized in the art under the same classification that infect NHA(s). E.g., references to influenza Ag(s) herein, such as hemagglutinin (HA), implicitly disclose both human influenza HA & NHA influenza HAs, such as canine influenza HAs, porcine influenza HAs, and the like. Thus, the term CMV implicitly provides support for AOTI relating to HCMV as well as other CMVs.

[0128] Constructs can be formed by any type of chemical synthesis or recombinant nucleic acid synthesis technology, numerous examples of which are KITA. Compositions & methods OTI comprise constructs comprising NSs encoding ≥1 (e.g., 2+ or 3+, such as 1-5, 1-4, 1-3, 2-5, 2-4, or 2-3) alphaherpesvirus glycoprotein D (“gD”) sequences (gDS(s)) in combination with other NS(s), such as 1 EEI(s), AgES(s), or CT.

[0129] One type of construct that is typically combined with other NS(s)/construct(s) to form still larger constructs (e.g., vectors, DEH) is an “expression cassette.” Many AOTI relate to NAM(s) comprising at 1 expression cassette (e.g., 1 expression cassette comprising 1 gDPES). In aspects, CEPESCs & methods OTI comprise NAMs comprising 2 expression cassettes (e.g., 2-4 or 2-3 expression cassettes). An “expression cassette” is KITA to mean a construct comprising (a) ≥1 CS (ORT as a “gene”) & (b) ≥1 regulatory sequence (DEH). Typical expression cassettes comprise a promoter operably linked to ES(s) (gene(s)). Other regulatory sequence(s)/control element(s) also can be present, e.g., a bacterial origin of replication, ≥1 selectable marker-encoding sequences, a signal which allows the plasmid construct to exist as single-stranded DNA (e.g., a M13 origin of replication), a multiple cloning site, a “mammalian” origin of replication (e.g., a SV40 or adenovirus origin of replication), or CT.

[0130] A “coding sequence” (CS) means a NS that is expressible in at least target host cells under suitable conditions. Expression products (both AARSs & nucleic acids) are also KITA as “cistrons.” A CS can be a WT CS or can be an EPES having a synthetic CS but encoding a WT PPT, due to redundancy/degeneracy of the genetic code, splicing, or CT. The term “open reading frame” (ORF) is also used ITA to refer to CSs, but the term ORF typically is limited to a single expression sequence whereas a “gene” can comprise two, three, or more ORFs. The term “subsequence” is used sometimes to refer to a NS encoding part of an ORF, such as part of a fusion protein. However, subsequences are typically just described as “sequences” herein. PHOSITA will be able to determine based on context whether a sequence is a subsequence or an entire coding sequence/ORF.

[0131] Numerous types of “regulatory sequences” are DEH, but commonly an expression cassette will at least comprise a promoter sequence, such as a SCUP. Expression cassettes often include a 3′ untranslated region (UTR), which usually contains a polyadenylation (polyA) site, as DFEH.

[0132] NSs can have any suitable length. Most CSs will be at least 6 nucleotides (nt) (bases) in length (e.g., in a 2 AAR linker), AgES will typically be at least 12 nt, and ≥21 bases in length for TCE ESs. In contrast, a gDSES/gDPES can be, e.g., ˜100-2100, 200-1800, 300-1500 bases, 450-1250, or ˜600-1200 nt in length (per coding strand). In AOTI, CEPESCs comprise NAMs that comprise at least about 2 kilobase pairs, ≥2.5 kbp, or ≥2.75 kbp, e.g., ˜2.5-4 kbp/kb, ˜2.5-5 kbp, or ˜3-5 kbp). A kilobase pair (kb, or kbp) is 1,000 base pairs & a megabase pair (Mb or Mbp) is one million base pairs. The abbreviation “bp” means “base pair(s)” & “nt” means “nucleotides.”

[0133] A NAM can be in any suitable form, such as a linear form (e.g., a mRNA or a linear expression element (LEE)) or a circular form (e.g., a plasmid) form, as well as double-stranded or single-stranded forms. E.g., RNA or DNA NAMs, which can include, e.g., cDNA, genomic DNA, synthetic DNA, and CT, may be double stranded or single stranded, and if single stranded typically will be a coding strand, but in AOTI can comprise a non-coding (anti-sense strand).

[0134] NSs can have any suitable origin or combination of origins, as in the case of “constructs.” E.g., NSs can comprise prokaryotic sequences, eukaryotic mRNA, cDNA from eukaryotic mRNA, genomic DNA sequences from eukaryotic (e.g., mammalian) DNA, synthetic DNA sequences, and CT. E.g., NSs can comprise ≥1 sequences from e.g., a virus genome (e.g., a non-infectious viral genome), messenger RNA (mRNA), complementary DNA (cDNA), plasmid DNA (pDNA), or derivatives of pDNA (e.g., minicircles as described in (Darquet, A-M et al., Gene Therapy 4:1341-1349 (1997)). NSs can include a gene or gene fragment (for example, an EST or SAGE tag), exons, and introns. NSs can be recombinant polynucleotides, synthetic polynucleotides, or CT. E.g., a NS in AOTI can be a recombinant, synthetic, and/or mutant NS. PHOSITA will understand terms such as “nucleic acid molecule” or “nucleotide sequence” to include any of the features associated with NAMs DEH. Production and use of nucleic acids is KITA (see, MOLECULAR CLONING, (2001), Sambrook and Russell, Eds. & METHODS IN ENZYMOLOGY: METHODS FOR MOLECULAR CLONING IN EUKARYOTIC CELLS (2003) Purchio & G. C. Fareed, Eds.

[0135] NSs can have any suitable composition. Suitability WRT NSs will typically be determined by, ia, the ability of the NS to carry out its intended function/exhibit its intended characteristics, and without possessing characteristics that detract from clinical use (e.g., undesired toxicity, immunogenicity, etc.). Typically, a NS is composed of polymers of deoxyribonucleotides (e.g., DNA) or ribonucleotides (e.g., RNA). Molecules of DNA and RNA in AOTI may be single, double, triple, or quadruple stranded form (SFE U.S. Ser. No. 10/407,695 and US20030100113). In aspects, NAMs are DNA molecules. In aspects, DNA molecules are circular, double stranded DNA molecules and typically are capable of stable extrachromosomal expression in host cells (plasmids). Plasmids and other vectors are DEH. DNA molecules comprising sequences encoding immunogenic proteins or that are otherwise immunogenic are often referred to here & ITA as “DNA vaccines.” However, the use of the term “DNA vaccine” is not meant to necessarily limit the application of such a composition to prophylactic applications.

[0136] In aspects, NSs/NAMs are composed of RNA, such as a messenger RNA (mRNA). RNA may be, in one embodiment, in the form of a tRNA (transfer RNA), snRNA (small nuclear RNA), rRNA (ribosomal RNA), mRNA (messenger RNA), or micro RNA (miRNA). “RNA vaccines” in aspects DOS induce both humoral & cellular immunity. In aspects, RNA vaccine constructs DOS outperform corresponding DNA-based vaccines in terms of inducing IRs. RNA can be produced in vitro, i.e. outside the cells, using a DNA template containing a coding sequence, such as an AgES, or can be generated synthetically. In AOTI, an RNA vaccine NAM of a CEPESC is a non-replicating mRNA. In aspects, CEPESCs comprise RNA vaccine NAM(s) that are self-replicating mRNA that comprises/requires a 2^{nd} RNA to ensure copying of the RNA vaccine NAM in vivo (e.g., an alphavirus-derived system, such as an alpha virus, picornavirus, or flavivirus system). In aspects, an RNA vaccine NAM is encompassed within a cell or other composition for delivery to a subject, such as a mRNA vaccine-loaded DC. In aspects, RNA NAMs comprise a capping modification, a polyA sequence (e.g., a polyA of about 100-200 nt, such as about 120-150 nt), a 5′-UTR (e.g., human heat shock protein 70 5′-UTR), one or more pseudouridine nucleosides, a phosphorothioate backbone, or a combination of any or all thereof, which detectably increases expression, half-life, or both. RNA vaccine technology is KITA and relevant PMCs that can be ATAOTI are provided in e.g., Pardi N et al. Nat Rev Drug Discov. 2018; 17(4): 261-279; Chahal J S et al, Proc Natl Acad Sci USA. 2016; 113(29): E4133-4; Vogel et al., 2017 DOI:https://doi.org/10.1016/j.ymthe.2017.11.017; Ulmer J B, Mason P W, Geall A, et al. (2012) Vaccine 4414-4418; Schlake T et al (2012) RNA Biol 9: 11, 1319-1330; McNamara et al (2015). J Immunol Res Article ID 794528; Ulmer J B, et al (2016) Curr Opin Immunol 41: 18-22; Ljungberg K et al. (2015). Expert Rev Vaccines 14: 177-194; Maruggi G, et al. Mol Ther. 2019; 27(4):757-772. doi:10.1016/j.ymthe.2019.01.020; Brito L A, et al. (2015) Adv Genet 89: 179-233; Sahin U et al (2014). Nat Rev Drug Discov 13: 759-780; Pardi N et al. Nat Rev Drug Discov. 2018; 17(4):261-279. doi:10.1038/nrd.2017.243; Van Lint S et al. Expert Rev Vaccines. 2015; 14(2):235-251. doi:10.1586/14760584.2015.957685; Versteeg L, et al. Vaccines (Basel). 2019; 7(4):122. doi:10.3390/vaccines7040122; Jackson N A C, et al. NPJ Vaccines. 2020; 5:11. doi:10.1038/s41541-020-0159-8; Feldman R A, et al. Vaccine. 2019; 37(25):3326-3334. doi:10.1016/j.vaccine.2019.04.074; and US 20140335112; US20190351040; US20200085852; WO2019126334; EP1797886B1; & US20200016274. The application of RNA vaccine technology to the constructs of this invention is a novel AOTI. RNA sequences may be or may be derived from, or may be variants or derivatives of, messenger RNA (mRNA), transfer RNA, ribosomal RNA, ribozymes, or CT. We conceive RNA constructs having features OTI will be useful in CEPESCs, despite the fact that not a single experiment in the Wistar Art is directed to such RNA constructs.

[0137] In aspects, CEPESCs comprising RNA sequence(s) encoding gDP(s) and Ag(s), such as gDAgFP(s) are provided. In aspects, RNA(s) are self-replicating RNA molecule(s). In aspects, RNA sequences comprise(s) a cap/capping modification (e.g., a 7-methyl-guanosine residue joined to the 5′-end via a 5′-5′ triphosphate; SFE Banerjee A K, Microbiol Rev. 1980 June; 44(2):175-205), a stability/expression promoting polyA sequence (e.g., a polyA of about 100-200 nt, e.g., 120-150 nt), or CT. In AOTI, the RNA molecule further comprises one or more of (a) a 5′-UTR (e.g., human heat shock protein 70 5′-UTR), (b) one or more pseudouridine nucleosides, (c) an at least partial phosphorothioate backbone, or (d) a combination of any or all thereof, which detectably increases expression, half-life, or both of the RNA molecule. In AOTI, the RNA molecules are loaded into and delivered in a dendritic cell. In AOTI, the RNA vaccine is delivered with a NAM encoding an ITII, such as an EAT-2 polypeptide-encoding DNA NAM. In AOTI, the RNA molecule FNSs of the composition also or alternatively comprise at least one PTPS-encoding sequence. In another aspect, the RNA molecule FNSs also or alternatively encode at least one epitope, at least one deglycosylation antigen variant, or both. In AOTI, the RNA molecule FNSs also or alternatively encode at least one linker between at least two antigenic sequences, a cleavage site (e.g., a 2A sequence or an intein), or a combination thereof. In AOTI, the RNA vaccine comprises sequences encoding at least one MHC I antigen against a disease-causing agent and at least one MHC II antigen against the same or a related disease-causing agent. In another aspect, the RNA vaccine also or alternatively encodes a B cell antigen. In AOTI, the RNA vaccine lacks any sequences encoding a B cell vaccine. In a particular case, the RNA vaccine comprises FNSs encoding an MHC I antigen and an MHC II antigen, either or both optionally comprising flanking sequences, without any B cell antigen to the disease-causing agent, wherein the expression of the RNA NAM results in a detectable, typically enhanced, often significant, and in several cases both significant and clinically relevant CTL response, a Th response, and a B cell response. In AOTI, the RNA vaccine comprises one or more cancer antigens. In AOTI, the RNA vaccine comprises one or more pathogen antigens (e.g., viral antigens). The invention also provides methods of treating or preventing diseases comprising delivering to an alphaherpesvirus infectable vertebrate host an effective amount of any such composition or two or more of such compositions (e.g., in a prime/boost administration regime). In certain aspects, methods are performed in TR(s) that do not regularly express HVEM, e.g., swine. In such cases, the antigens may be PCV antigens, PRRSV antigens, or ASFV antigens, examples of which are provided elsewhere herein. In some aspects of the invention, compositions and method comprising both RNA and DNA vaccines of the invention are provided (e.g., a method in which a DNA vaccine construct is delivered followed by an RNA vaccine construct, or vice versa, or a combination of such constructs are delivered). In general, any of the various aspects and facets of the invention described herein can, where suitable, be performed with RNA vaccine constructs, as exemplified by the general use of “nucleic acid molecule” in most aspects and facets of the invention provided in this disclosure.

[0138] In aspects, NAMs in CEPESCs PC, GCO, or CO of DNAs. DNA NAMs may be, e.g., in form of plasmid DNA, viral DNA, linear DNA (e.g, an LEE), or chromosomal DNA or derivatives thereof, variants thereof, or CT.

[0139] “Nucleotides” (NTs/nts sometimes aka bases) are the monomeric units of NAMs. As KITA, NTs comprise bases and backbones. NAMs can be artificial nucleic acids that contain other types of backbones from WT NSs, but still retain ordinary bases. NSs also can comprise 1 artificial or modified nucleotides. However, in aspects MGAOA NSs comprise only conventional sugars, bases, & linkages, as found in RNA & DNA. In aspects, NSs include both conventional bases and substitutions (e.g., conventional bases linked via a methoxy backbone or 1 base analogs). In aspects, NAMs/NSs include nucleic acids containing analogues of natural nucleotides that have similar binding and other functional properties, and that typically are metabolized in a manner similar to naturally occurring nucleotides, as a referenced WTC NAM/NS or NAM/NS in WT form. Sugar moieties of a NSs may be ribose or deoxyribose, or similar compounds having known substitutions, e.g., 2′ methoxy substitutions (containing a 2′-O-methylribofuranosyl moiety; SFE WO 98/02582) O 2′ halide substitutions. Nitrogenous bases may be conventional bases (A, G, C, T, U), known analogs thereof (e.g., inosine or others; see THE BIOCHEMISTRY OF THE NUCLEIC ACID 5-36, Adams et al., ed., 11^{th} ed., 1992), or known derivatives of purine or pyrimidine bases (see, Cook, PCT Int'! Pub. No. WO 93/13121) or “abasic” residues in which the backbone includes no nitrogenous base for one or more residues. Modifications to NSs in terms of incorporation of artificial or modified nucleotides are particularly tolerable in the 3rd position of a codon. Examples of modified nucleotides that can be incorporated in NSs are listed in, e.g., the MANUAL OF PATENT EXAMINING PROCEDURE § 2422 (9th Revision—2018). Additional and alternative sequence modifications are described elsewhere herein. In AOTI, NSs include bases that is/are oxetane modified. It also may be possible for CSs or other NSs to comprise one or more xenonucleic acids (XNAs). SFE Pinheiro, V. B. et al. Synthetic Genetic Polymers Capable of Heredity and Evolution. Science 336, 341-344 (2012).

[0140] NSs can include conventional phosphodiester bond or a non-conventional bond (e.g., an amide bond, such as found in peptide nucleic acids (PNAs)). In aspects, NSs comprise 1+ nucleotides that contain backbone portions not found in native DNA or RNA, but comprise ordinary bases. In aspects, an artificial NS is/comprises a PNA (e.g., WO 95/32305), a methylphosphonate backbone, or another alternative backbone. In aspects, NSs comprise backbones modified by replacement of ≥1 phosphodiester bonds with phosphorothioate bond(s). SFE Neilsen P E, Curr Opin Struct Biol 9:353-57 & Raz N K et al, Biochem Biophys Res Commun. 297:1075-84. In aspects, phosphorothioates DOS improve cellular uptake, bioavailability, or both (PMCs are described in Eckstein F. Nucleic Acid Ther. 2014; 24(6):374-387. doi:10.1089/nat.2014.0506). In aspects, NSs comprise chirally controlled oligonucleotides (SFE US 20200080083 & US 20020137921). In aspects, NS(s) comprise a modification that promotes DOS prolonged stability in one or more environments, e.g., NSs with chiral phosphorus linkages such as phosphorothioate or boranophosphate intermonomer linkages (SFE U.S. Ser. No. 10/457,945). Phosphorothioate nucleotide analogs and related compositions and methods ATAOTI are described in, e.g., U.S. Pat. No. 9,278,990 and WO 2018141908A1. In aspects, NSs comprise branched nucleotide sequence(s). E.g., nucleic acid polymerases can replicate a 2′,5′-branched DNA (bDNA) molecule. SFE Döring J, Hurek T. Dual coding potential of a 2′,5′-branched ribonucleotide in DNA. RNA. 2019; 25(1):105-120. doi:10.1261/rna.068486.118.

[0141] In aspects, NAMs/NSs include features that promote pre-expression processing, e.g., NAMs that that comprise introns, such as self-splicing introns (SFE U.S. Pat. No. 6,010,884). NSs can comprise sequences that result in other splice modifications at the RNA level to produce an mRNA transcript encoding EPs and/or at a DNA level by way of trans-splicing mechanisms prior to transcription (PMCs are described in, e.g., Chabot, Trends Genet (1996) 12(11):472-78; Cooper (1997) Am J Hum Genet 61(2):259-66; & Hertel et al. (1997) Curr Qpin Cell Biol 9(3):350-57).

[0142] NSs typically are presented here in single strand form (regardless of whether the sequence is part of a single stranded or double stranded NAM), in the 5′ to 3′ direction, from left to right, using the 1-letter nucleotide symbols commonly used ITA & in accordance with the recommendations of the IUPAC IUB Biochemical Nomenclature Commission.

[0143] In aspects of the disclosure, biomolecules, such as NAMs/NSs are labeled with labels such as “1st,” “2nd,” or “3rd,” etc. Unless indicated, the use of terms such as “1st NS” and “2^{nd} NS” is only for clarity and is not meant to indicate a specific order/arrangement of such sequences.

[0144] In contexts, NSs described herein are described as “functional” nucleotide sequences (FNSs). A FNS is any NS that exhibits DOS intended functions/properties in intended host cell(s)/TR(s) under intended conditions of use, storage, replication, etc. A common function associated with a nucleotide sequence is the ability to be expressed. Another function is the ability to enhance the expression of another sequence, which is associated with sequences such as promoter sequences, enhancer sequences, & EEIs. Still other NSs are able to directly induce IR(s), e.g., ISNS(s).

### 1. Regulatory Elements

[0145] As noted above, expression cassette constructs typically include 1+, 2+, or more regulatory elements. “Regulatory elements” include any non-coding sequence(s) that aid in expression of CS(s), the stability of NS(s)/NAM(s), or both. Regulatory elements (aka, regulatory sequences) can be characterized as any NS that promotes, enhances, or controls expression/transcription of another NS (typically one or more CSs).

[0146] Typical regular elements include, for example, a promoter, an enhancer, an initiation codon, a stop codon, and a polyadenylation (polyA) signal. Regulatory elements are typically operably linked to CS(s). Regulatory elements include enhancer-promoter combinations, or other NSs that affect the expression or transcription of an associated, typically downstream NS (e.g., an expression-enhancing intron). Regulatory elements can be of various origins, both natural and synthetic, as exemplified throughout this disclosure.

[0147] Regulatory elements can be obtained from any suitable source. Transcriptional and translational control sequences for mammalian host cell expression vectors can be, e.g., excised from viral genomes. Polynucleotide sequences derived from the SV40 viral genome, e.g., an SV40 origin, early and late promoter, enhancer, splice, and polyadenylation sites can be as regulatory elements for a structural gene sequence in a mammalian host cell. Viral early and late promoters are often useful because both are easily obtained from a viral genome as a fragment, which can also contain a viral origin of replication (Fiers et al., Nature 273:113, 1978; Kaufman, Meth. in Enzymology, 1990).

[0148] Suitable promoters in NAMs can be inducible promoters, repressible promoters, and constitutive promoters. Examples of suitable promoters include cytomegalovirus hCMV immediate early gene promoter (CMV IE) (SFE U.S. Pat. No. 5,168,062), early or late promoters of SV40 adenovirus, Human elongation factor-1 alpha (EF-1 alpha) promoter, phosphoglycerate kinase promoters (e.g., the human PGK1 promoter), human metallothionein 1G promoter, UBC promoters, human beta actin promoters, U6 promoters, H1 promoters, & 7SK promoters. Other promoters include human immunodeficiency virus (HIV) long terminal repeat (LTR) promoter, MoMuLV promoter, avian leukemia virus promoter, Epstein-Barr virus immediate early promoter, Rous sarcoma virus promoter, and human gene promoters such as, but not limited to, the actin promoter, the myosin promoter, the hemoglobin promoter, and the creatine kinase promoter. Additional suitable promoters are described below and EH.

[0149] Promoter(s) can be multi-cell-operable promoter(s) (aka ubiquitous promoters), able to effectuate promoter functions in a number of different cells/TRs, typically without significant loss in functioning. Examples of ubiquitous promoters include the CMV IE promoter, the EF-1a promoter, PGK promoters, UCB promoters, UCOE promoters and GUSB (hGBp) promoter (SFE Husain et al. Gene Ther. 2009; 16(7):927-932. doi:10.1038/gt.2009.52). In aspects, promoter(s) in construct(s) of comprise, PC, GCO, or consist of such ubiquitous/multi-cellular promoters. In aspects, promoters PC, GCO, or CO promoter(s) that can be characterized as ubiquitous promoters.

[0150] In aspects, promoters of NSs PC, GCO, or CO one or more tissue/cell specific promoters, exhibit promoter activity only in certain cell types/tissues or exhibiting significantly enhanced expression in certain cells/tissues. Examples of such promoters include muscles-specific promoters such as muscle creatine kinase (MCK) and desmin (1.7 kbs) and the α-myosin heavy chain (α-MHC; 1.2 kbs) promoter. In hematopoietic stem cells the synthetic MND promoter (Li et al., 2010) and the promoter contained in the 2AUCOE (ubiquitous chromatin opening element) have shown to drive a higher transgene expression compared to the EF1α and CMV promoters, respectively (Zhang et al., 2007; Koldej 2013; Dighe et al., 2014). High tissue specificity of gene expression was shown in both pancreatic tissue using the insulin promoter157. The α1-antitrypsin (hAAT; 347 bps) and the thyroxine binding globulin (TBG; ˜400 bps) promoters drive gene expression restricted to the liver with minimal expression in other tissues (Yan et al., 2012; Cunningham et al., 2008). The ANF (atrial natriuretic factor) promoter drives expression in cardiomyocytes, the CC10 (club cell 10) promoter drives expression in human epithelial cells, the SP-C (surfactant protein C) promoter drives expression in lung epithelial cells, the C5-12 promoter is a synthetic muscle-specific promoter, and numerous neuronal specific promoters are known, such as the PDGF-β (platelet-derived growth factor-β) promoter. Other examples include mammalian troponin 1 promoters and skeletal alpha-action promoters. In AOTI constructs of are free of any tissue-specific promoters.

[0151] In aspects, promoters are associated with enhancer elements (e.g., a CMV enhancer), or other promoter elements (to form a hybrid promoter), to DOS enhance expression. Relevant PMCs are described in, e.g., Ara Hacobian et al. Tissue Engineering Part B: Reviews. June 2018.226-239.http://doi.org/10.1089/ten.teb.2017.0353.

[0152] Promoters of constructs can be constitutive promoters, inducible promoters, or repressible promoters, or CT. In AOTI, promoters in constructs comprise, PC, GCO, or CO promoters categorized as constitutive promoters (one or more unregulated promoter elements that allows for continual transcription of associated coding sequences). A constitutive promoter generally will cause an associated CS to be produced in a cell under most or all physiological conditions of the cell. Well-known constitutive promoters include the CMV IE promoter, the EF1α promoter, PGK promoters, SV40 promoters, UBC (Ubc) promoters, the human beta actin promoter, U6 promoters, the H1 promoter, chicken β-actin (CBA) promoter and its hybrid promoter derivative CAG are also constitutive promoters, as are the β glucuronidase (GUSB) and ubiquitin C (UBC) promoters.

[0153] Alternatively, promoter(s) comprise, PC, GCO, or CO inducible promoter(s), which are up- and or down-regulated in response to an appropriate signal/factor (aka an inducer). Inducible promoters ATAOTI include tetracycline response element (TRE) promoters or similar promoter (e.g., Tet-Off or Tet-on systems (Clontech, Palo Alto, Calif.)), a macrolide-inducible expression system (Weber W et al. Methods Mol Biol. 2004; 267:451-466. doi:10.1385/1-59259-774-2:451); a Coumermycin/Novobiocin-Regulated Gene Expression System (Zhao et al. Hum Gene Ther. 2003; 14(17):1619-1629. doi:10.1089/104303403322542266); a light responsive promoter (SFE Hörner et al. Methods Mol Biol. 2017; 1651:173-186. doi:10.1007/978-1-4939-7223-4_13) a metallothionein promoter; an estrogen receptor promoter, a heat shock protein promoter, E1B promoter, a hypoxia induced promoter, lymphokine-inducible promoters (e.g., promoters inducible by interferons or interleukins), an ecdysone or ecdysone-analog-inducible promoters (ecdysone-analog-inducible promoters are commercially available through Stratagene (LaJolla Calif.)), or a MMTV LTR inducible promoter. Additional inducible promoters include arabinose-inducible promoters, a steroid-inducible promoters (e.g., a glucocorticoid-inducible promoters), isopropyl beta-D-thiogalactopyranoside (IPTG)/Lac inducible promoters (SFE Edamatsu H et al. Gene. 1997; 187(2):289-294. doi:10.1016/s0378-1119(96)00768-8), doxycycline inducible promoters (SFE Yang T et al. Plasmid. 2014; 72:29-35. doi:10.1016/j.plasmid.2014.04.001), and pH, stress, & heat-inducible promoters (SFE Voellmy R, et al. Cell Stress Chaperones. 2018; 23(4):455-466. doi:10.1007/s12192-018-0875-4). Constructs comprising such promoter(s) are an AOTI as are uses of such constructs.

[0154] Promoter elements can originate from any suitable source. E.g., constructs can include one or more viral promoters, one or more natural non-viral promoters, one or more modified promoters, one or more synthetic promoters (e.g., hybrid promoters), or a combination of two or more thereof.

[0155] Viral promoters include, e.g., the CMV IE and SV40 promoters, as well as the adenovirus major late promoter (Ad MLP), and the herpes simplex virus promoter, among others. In AOTI, the promoters used in constructs of the invention include, primarily comprise, generally consist of, or consist of one or more viral promoters. For example, one aspect of the invention is a composition comprising one or more NAMs comprising FNSs encoding a gD antigen fusion protein (such as any of those described in the Summary of the Invention) operatively linked to a CMV IE promoter, and optionally comprising one or more other elements described in the Summary of the Invention, such as an expression-enhancing intron sequence, one or more PTPSs, or one or more ITIIs, such as an EAT-2 polypeptide.

[0156] Non-viral promoters, such as a promoter derived from the murine metallothionein gene, also can be used in constructs. In aspects, promoter(s) comprise, PC, generally consist of, or consist of one or more non-viral promoters. Non-viral promoters include the EF1α promoter and the human beta actin promoter, among others, as well as hybrid promoters (e.g., a CAG promoter) and purely synthetic promoters.

[0157] In AOTI, promoter(s) of construct(s) include, PC, GCO, or CO ≥1 hybrid (or “chimeric”) promoters, such as a CMV-chicken ß-actin promoter (CBA promoter) or a known derivative thereof, such as a CAG or CBh promoter (SFE Boye et al. Investigative Ophthalmology & Visual Science May 2006, Vol. 47, 852. doi:https://doi.org/). In aspects, a hybrid promoter exhibits tissue specific properties. E.g., combining a uroplakin II gene promoter with the enhancer sequence of the prostate stem cell antigen gene can express the antioncogenic E1A-androgen receptor specifically in bladder tumor cells (Wang D et al. Urol Oncol. 2010; 28(2):164-169. doi:10.1016/j.urolonc.2008.02.002). Other synthetic promoters are discussed in, e.g., Rushton P J. Methods Mol Biol. 2016; 1482:1-13. doi:10.1007/978-1-4939-6396-6_1. In one aspect, the invention provides constructs comprising a CAG promoter (SFE Miyazaki, J et al (1989). Gene. 79 (2): 269-77. doi:10.1016/0378-1119(89)90209-6. PMID 2551778 & Alexopoulou A N, et al. BMC Cell Biology 9: 2, 2008, PMID 18190688). E.g., in aspects, constructs comprising a CAG promoter operatively linked to gD:antigen fusion proteins DEH and optionally further comprising any of the facets, aspects, or features of any such compositions, such as comprising EEI(s), one or more Ag-associated PTPS-encoding sequences, or an ICSTAP-encoding sequence, e.g., an EAT-2 PPT ES, are provided as an AOTI.

[0158] In aspects, promoter(s) in constructs are “strong” promoters. Strong promoters are promoters that are able to achieve a high level of expression according to one or more various ratings or tests known in the art. On such basis, for example, the CMV IE promoter (particularly when matched with the CMV IE enhancer), the EF-1α promoter, CAG promoter (when matched with the CMV IE enhancer), the SV40 early promoter, and TRE promoters are characterized as strong promoters, whereas the UBC (human ubiquitin C promoter) and GUSB, for example, are not considered to be strong promoters. Examples of methods & standards for the evaluation of strong and weak promoters are provided in, e.g., Powell S K et al. Discov Med. 2015; 19(102):49-57 and Qin J Y, et al. PLoS One. 2010; 5(5):e10611. doi:10.1371/journal.pone.0010611. In some aspects, ≥1 of the promoters incorporated into constructs will have a rate of inactivation that is the same or less than the CMV promoter in different cell types. Promoters that have a lower rate of deactivation than CMV include the human elongation factor-1 alpha promoter (EF1α promoter or EF-1α promoter) and CAG promoter, whereas PGK promoters have a rate of inactivation that is similar to or greater than CMV promoters. In one aspect, the promoter element(s) of constructs of the inventive compositions and methods also or alternatively to any of the other aspects described in connection with promoter elements herein comprise, primarily comprise, generally consist of, or consist of one or more strong promoters, such as CMV IE or CAG promoters. In one aspect, the constructs comprise, primarily comprise, are generally associated with, or only contain promoters that are both strong promoters and promoters with low deactivation rates such as a CAG promoter or an EF1α promoter. Thus, for example, the invention provides compositions comprising one or more NAMs that contain a gD:antigen fusion protein-coding sequence that is operatively linked to a strong promoter, a low deactivation rate promoter, or a promoter having such features, such as a CAG promoter, wherein the FNSs of the one or more NAMs can further include any of the various features described in the Summary of the Invention, such as an ITII-encoding sequence, an expression-enhancing intron sequence, a PTPS-encoding sequence, or a combination of any or all thereof.

[0159] In aspects, construct(s) comprise promoter(s) that is/are classifiable as a constitutive promoter, a ubiquitous promoter, or a constitutive and ubiquitous promoter. In one aspect, the promoter is further classifiable as a strong promoter. In still another aspect, the promoter is also or alternatively characterized as being a universal promoter. In aspects, OSMGAOA promoter(s) of constructs are SCUPs (being strong, constitutive, and universal).

[0160] In aspects, regulatory element(s), such as promoter(s), in constructs, result in DOS increase in expression of operably linked CS(s). In aspect(s), the regulatory element(s) result in “high level expression,” which means levels of expression at least 5-fold, 10-fold, at least 20-fold, at least 50-fold greater, at least 100-fold greater, at least 1000-fold (3-log) greater, or at least 10,000 fold (4-log) greater or more, within the first 1, 2, or 3 days following transformation than without the regulatory element(s), than typical levels of endogenous gene expression, or both. In another aspect, transformation with a construct of the invention results in “persistent” high level expression. The terms “transformation” and “transfection” are used the same herein, unless expressly otherwise indicated or clearly contradicted by context and should be considered interchangeable with “transduction,” wherever delivery of constructs through viral vectors is considered appropriate. “Persistent,” high levels of expression means that high level expression of the coding sequence(s) (transgene(s)) persists for ≥1 week, typically ≥2 weeks or more, for example, ≥3 weeks, ≥5 weeks, ≥7 weeks, e.g., 9 weeks or more, 13 weeks or more, 18 weeks or more, 6 months or more, e.g. 12 months. In other words, the expression level of the transgene does not decrease more than 100-fold, more usually not more than 50-fold, in some instances, not more than 10-fold in the 2 weeks or more, i.e. 3 weeks, 5 weeks, 7 weeks, 9 weeks or more, 13 weeks or more, 18 weeks or more, 6 months or more following transformation from levels observed within the first 1, 2, or 3 days post-transformation/transfection. In aspects of the invention, one or more promoters of constructs provided herein exhibit one or more of these features.

[0161] In one aspect, promoters of constructs comprise, PC, GCO or CO promoters or promoter/enhancer combinations that have a size (or combined size) of less than 1.25 kbs (e.g., a UBC promoter), or less than 1 kbs (e.g., an SV40 early promoter, a PGK promoter). In aspects, promoters or promoter/enhancer combinations comprise, PCGCOOCO promoters that have a size of ≥0.6 kbs, ≥0.8 kbs, ≥1 kbps, ≥˜1.1 kbs, or ≥1.5 kbs.

[0162] In aspects, promoter(s) comprise bi-directional promoter(s) (described in, e.g., U.S. Pat. No. 5,017,478) linked to 2+ CSs.

[0163] In aspects, promoter(s) comprise a TATA-associated sequence (a so-called TATA box or Hogness box), alone or in combination with additional promoter elements. TATA-less promoters also can be suitable in some contexts. Promoters also often will include a “CAT” box sequence, which are similarly KITA. Additional examples of promoters are described in, e.g., WO 2002/00897, Werner (1999) Mamm Genome 10(2): 168-75, Walther et al. (1996) J Mol Med 74(7):379-92, Novina (1996) Trends Genet 12(9):351-55, Hart (1996) Semin Oncol 23(1):154-58, Gralla (1996) Curr Opin Genet Dev 6(5):526-30, Fassler et al. (1996) Methods Enzymol 273:3-29, Ayoubi et al (1996), 10(4) FASEB J 10(4):453-60, Goldsteine et al. (1995) Biotechnol Annu Rev 1:105-28, and U.S. Pat. No. 6,194,191. Other suitable promoters can be identified by use of the Eukaryotic Promoter Database (release 68) (presently available at http://www.epd.isb-sib.ch/) and other, similar, databases, such as the Transcription Regulatory Regions Database (TRRD) (version 4.1) (available at http://www.bionet.nsc.ru/trrd/) and the transcription factor database (TRANSFAC) (available at http://transfac.gbf.de/TRANSFAC/index.html). Additional human promoters are described in, e.g., Kim T H, Barrera L O, Zheng M, et al. Nature. 2005; 436(7052):876-880. doi:10.1038/nature03877. Still further examples of promoter-related PMCs are provided in, e.g., Gray S J et al. Hum Gene Ther. 2011; 22(9):1143-1153. doi:10.1089/hum.2010.245; Xu Z L et al. Gene. 2001; 272(1-2):149-156. doi:10.1016/s0378-1119(01)00550-9; Magnusson T et al. J Gene Med. 2011; 13(7-8):382-391. doi:10.1002/jgm.1585; and Romanova N et al. Biotechnol J. 2018; 13(3):e1700232. doi:10.1002/biot.201700232.

### ii. Other Regulatory Elements

[0164] NSs can AOI comprise ≥1 internal ribosome entry sites (IRESs), or RNA sequence enhancers (Kozak consensus sequence analogs), e.g., tobacco mosaic virus omega prime sequence. IRESs are DEH.

[0165] Constructs can also comprise enhancer(s). In aspects, enhancer(s) DOS modulate expression specificity in terms of time, location, and expression level of operably linked CSs. Numerous highly effective enhancers are well known in the art (SFE Scharf D. et al. (1994) Results Probl Cell Differ 20:125-62: and Bittner et al. (1987) Methods in Enzvmol 153:516-544 for discussion). Suitable enhancers include, for example, RTE enhancers described in U.S. Pat. No. 6,225,082, and the human actin, human myosin, human hemoglobin, & human muscle creatine enhancers, which are KITA. Additional examples of enhancers include the SV40 early gene enhancer, as described in Dijkema et al., EMBO J. (1985) 4:761, the enhancer/promoter derived from the long terminal repeat (LTR) of the Rous Sarcoma Virus, as described in Gorman et al., Proc. Natl. Acad. Sci. USA (1982b) 79:6777 and elements derived from human CMV, as described in, e.g., Boshart et al., Cell (1985) 41:521 and Jeong et al., EXPERIMENTAL AND MOLECULAR MEDICINE, Vol. 34, No. 4, 278-284, September 2002. The CMV enhancer, as noted above, is often paired with promoters, such as the CAG promoter. The WT HCMV enhancer is upstream of the HCMV promoter at −598 to −68 (˜600 bps). In aspects, enhancer(s), promoter(s), or a combination enhance expression of operably linked CDs 4-, 8-, 45-, 50-, and 90-fold. As is the case with the CMV promoter, the CMV enhancer is considered a “universal” enhancer, working in many cell types. Inclusion of such enhancers in constructs is an AOTI. In AOTI, constructs of comprise an enhancer. In other aspects, constructs of the invention comprise only a portion of an enhancer, such as a portion of the CMV enhancer. Both constructs comprising & lacking enhancer elements are AOTI.

[0166] In aspects, constructs comprise Ubiquitous Chromatin Opening Element (UCOE), which exhibit promoter/enhancer function(s). At least some UCOE sequences also prevent transgene silencing and induce consistent and high-level gene expression. In some contexts, a construct of the invention can comprise a UCOE or a portion of a UCOE. In some contexts, the UCOE is not integrated into the chromosome of a host when the construct is delivered. Examples of UCOEs are described in, e.g., Antoniou M N, Skipper K A, Anakok O. Hum Gene Ther. 2013 April; 24(4):363-74; Maksimenko O et al, Acta Naturae. 2015 July-September; 7(3):15-26; Nair, A. R., et al. BMC Res Notes 4, 178 (2011). https://doi.org/10.1186/1756-0500-4-17; and Nevillea et al., Biotechnol Adv. 2017; 35(5):557-564, https://doi.org/10.1016/j.biotechadv.2017.05.004. However, in aspects, constructs are CB lacking any UCOE sequences.

[0167] Regulatory element(s) incorporated into constructs, such as plasmids, can also include element(s) that act as transcription-termination elements (aka, a transcription-termination region), a transcript-stabilizing element, a translation promoting element, or a nuclear export element, or a CT.

[0168] DNA constructs typically include a polyA sequence that facilitates cleavage and polyadenylation of expressed RNA transcripts. In aspects, the polyA sequences include the sequence motif AAUAAA. Examples of suitale polyA sequences include the polyadenylation sequences of BGH (Bovine Growth Hormone), human growth hormone gene, polyoma virus, TK (Thymidine Kinase), EBN (Epstein Barr Virus), rabbit beta globin, and the papillomaviruses, including human papillomaviruses and BPV (Bovine Papilloma Virus). Additional principles related to selection of appropriate polyadenylation sequences are described in, e.g., Chen et al. (1995) Nucleic Acids Res 23(14):2614-2620, Moreira et al. (1995) EMBO J 14(15):3809-3819, Carswell et al. (1989) Mol Cell Biol 1989 9(10):4248-4258. One example of a polyA sequence that can be incorporated into constructs and vectors is SEQ ID NO:10.

[0169] In one aspect, constructs of the invention incorporate one or more polyadenylation (polyA) sequences that detectably or significantly increase nuclear export, expression, translation, expressed mRNA stability, or a combination of any or all thereof. In one aspect, the polyadenylation sequence of the construct is one that affords an at least about 125%, at least about 150%, at least about 175%, at least about 200%, at least about 225%, at least about 250%, or at least about 275%, such as an about 125-350%, about 125-300%, about 150-300%, about 150-350%, or about 200-350% increase in expression as compared to a a minimal synthetic polyA (SPA) signal in one or more target cells (SFE Levitt N et al. Genes Dev. 1989; 3(7):1019-1025. doi:10.1101/gad.3.7.1019 and Yew N S, et al. Hum Gene Ther. 1997; 8(5):575-584. doi:10.1089/hum.1997.8.5-575). Such polyadenylation (polyA) sequences include the SV40 (human Sarcoma Virus-40) polyadenylation sequence and the BGH polyA (bGHpA) sequence. Such polyA sequences are described in, e.g., Goodwin et al. (1998) Nucleic Acids Res 26(12):2891-8, Schek et al. (1992) Mol Cell Biol 12Q2:5386-93. & van den Hoff et al. (1993) Nucleic Acids Res 21(21):4987-8. In aspects, constructs comprise, PC, generally are associated with or only contain 1 polyA sequences that is CB as having a strong polyA sequence effect (e.g., a polyA having enhancement effects similar to the SV40 late polyA or bGH polyA). In another aspect, the constructs in the compositions of the invention or used in the methods of the invention comprise, primarily comprise, generally are associated with, or only contain polyA sequences that are classified as relatively weak polyA sequences, such as a SPA or a human growth hormone (hGH) poly A sequence.

[0170] A construct can have any suitable number of polyadenylation sites. Typically, each coding sequence will have a single polyA site, but the expression of pre-mRNAs with multiple polyadenylation sites are known (e.g., in the case of human vascular endothelial growth factor A (VEGF-A)) and such constructs are, in one aspect, also or alternatively incorporate multiple polyA sites.

[0171] In aspects, constructs comprise polyA modulating cis-acting regulatory elements, such as enhancer elements, e.g., polyA USE sequence(s). In AOTI, constructs comprise 1 polyA USE sequence(s), that DOS enhance expression of associated CS(s). The polyA signal (AAUAAA) of SV40 mRNAs, e.g., contains up- and down-stream sequences influencing efficacy of polyA signal(s) during mRNA processing. (SFE Schambach A et al. Mol Ther. 2007; 15(6):1167-1173. doi:10.1038/sj.mt.6300152 & Schek N et al. Mol Cell Biol. 1992; 12(12):5386-5393. doi:10.1128/mcb.12.12.5386). In aspects, a polyA USE increases associated CS expression, by 125%, 150%, 175%, or ≥200%. In aspects, constructs comprise 1, 2, or 2+ USEs & polyA(s), wherein the USE(s) DOS enhance CS expression. Exemplary USEs include the SV40 2×USE, the HIV-1 USE, the ground squirrel hepatitis virus (GHV) USE, the adenovirus (L3) USE, the human prothrombin (hTHGB) USE, & the human C2 complement (hC2) USE.

[0172] In aspects, constructs incorporate a non-polyA post-transcriptional regulatory element sequence (e.g., a sequence that acts as an alternative transcript-stabilizing and/or nuclear export element), such as a woodchuck hepatitis virus post-transcriptional regulatory element (WPRE) (SFE Zufferey R et al. J Virol. 1999; 73(4):2886-2892), a HPRE (Hepatitis B Virus PRE—SFE Huang Z M et al. Mol Cell Biol. 1995; 15(7):3864-3869. doi:10.1128/mcb.15.7.3864), or a constitutive transport element (CTE) of the simian retrovirus type 1 (SRV-1). E.g., constructs can comprise 1 non-polyA post-transcriptional regulatory element sequences (e.g., non-polyA sequences that are transcript-stabilizing or nuclear export promoting elements), e.g., 1, 2, or 2+ WPREs, e.g., in association with a gDP, typically in a viral vector. In one aspect, such constructs lack any intron sequences. In one aspect, such constructs DOS enhance expression of associated CSs. In AOTI, constructs incorporating such elements are associated with ≥1.5×, at least about ≥2×, ≥2.5×, at least about 3×, ≥4×, or ≥5× increase in CS expression (e.g., ˜2-10 or ˜2.5-7.5 increase in expression). In another aspect, such a construct also or alternatively is associated with a detectably lower amount of expression silencing or a significantly lower amount of expression silencing. Other known non-polyA transcription and transcript regulatory sequences including the 5′ UTR of human heat shock protein (Hsp/HSP) 70 (SFE Vivinus S et al. Eur J Biochem. 2001; 268(7):1908-1917. doi:10.1046/j.1432-1327.2001.02064.x) and the mouse RNA transport element (RTE) (SFE F. Nappi, et al., J. Virol., 75 (2001), pp. 4558-4569). Use of mammalian poly(A) signals in combination with certain viral packaging systems has been associated with reduced viral titer in some reports, but improved transcript life, such that in aspects of the invention comprising viral vectors non-poly(A) transcript-stabilizing and nuclear export elements are often incorporated in place of polyA sequences, such as a WPRE or a CTE. In aspects, a construct of the invention, such as a viral vector associated construct, can comprise a synthetic transcript-stabilizing or nuclear export element, such as a hybrid of a CTE and RTE elements, an example of which is the RTEm26-CTE element described in Smulevitch S, et al. 2006; 3:6. doi:10.1186/1742-4690-3-6. Fragments of such elements, such as functional fragments of WPREs are known in the art and can be incorporated into certain constructs of the invention, e.g., a construct that lacks an intron (including, e.g., a promoter or promoter/enhancer associated with an intron, such as forms of EFα1 or CAG promoters that contain introns) and is associated with a viral vector. However, in other contexts, viral vector associated constructs comprise a polyA that is a classified as a weak polyA, such as a hGH polyA or an SPA.

[0173] Elements such as a polyA, WPRE, etc. are typically located in a 3′-untranslated region (3′-UTR), which immediately follows a stop codon of an expression cassette and is not translated. In AOTI, constructs comprise a 3′-UTR. 3′-UTRs often contain elements DOS influencing gene expression, including polyadenylation, localization, stability, & mRNA translation efficiency.

[0174] Other regulatory sequences include transcription termination sequence, internal ribosome entry sites (IRES), splicing control sequences, or an upstream activator sequence (UAS), such as a Gal4 activator sequence (SFE U.S. Pat. No. 6,133,028) or other upstream regulatory sequences (SFE U.S. Pat. No. 6,204,060). NAMs can include other specific initiation signals that aid in efficient translation of a coding sequence, such as a WT or FV Kozak consensus sequence (as described in U.S. Pat. No. 6,107,477 (e.g., GCCACCATG, GCCACCATG, or GCCGCCACCATGG (SEQ ID NO:458)). NAMs can comprise site-specific recombination sites, which can be used to modulate transcription of NSs (SFE U.S. Pat. Nos. 4,959,317, 5,801,030 & 6063627; EP 0987326; & WO 97/09439). NAMs can contain an origin of replication that confers the ability to replicate in the desired host cells, sites to enable incorporation of other NSs (e.g., a multiple cloning site (MCS), aka a polylinker (a short NS which contains many (e.g., 2-20, 3-15, 4-12, or 4-20) restriction sites, MGAOA being unique to the construct/vector).

[0175] Constructs can also include nuclear targeting sequences (NTSs) that DOS enhance NAM delivery to the nucleus (e.g., part of the smooth muscle γ-actin promoter harbors binding sites for transcription factors improves uptake of plasmid DNA & binding sites of the transcription factor NF-κB increase expression of associated CSs when contained in cationic lipid-associated plasmid DNA). The SV40-DTS sequence also can induce active nuclear import of DNAs. Thus, In AOTI, constructs can include any of the foregoing elements, such as one or more NTSs. In other AOTI, constructs lack any NTS.

[0176] Additional regulatory elements that can DOS improve expression of heterologous genes from mammalian expression vectors include such elements as the expression augmenting sequence element (EASE) derived from CHO cells (Morris et al., Animal Cell Technology, 1997, pp. 529-534 and PCT Application WO 97/25420) and the tripartite leader (TPL) and VA gene RNAs from Adenovirus 2 (Gingeras et al., J. Biol. Chem. 257:13475-13491, 1982). The internal ribosome entry site (IRES) sequences of viral origin allows dicistronic mRNAs to be translated efficiently (Oh and Sarnow, Current Opinion in Genetics and Development 3:295-300, 1993; Ramesh et al., Nucleic Acids Research 24:2697-2700, 1996). Expression of a heterologous cDNA as part of a dicistronic mRNA followed by the gene for a selectable marker (e.g. DHFR) has been shown to improve transfectability of the host and expression of the heterologous polynucleotides (Kaufman, Meth. in Enzymology, 1990).

[0177] CS(s) of a construct and associated regulatory sequences will typically be operably linked (aka, operably associated). NSs are “operably linked” when they are associated in a manner as to DOS enhance/induce expression, or carry out other intended function(s) (e.g., enhancement of mRNA transcript stability) when the CS(s) and regulatory sequence(s) are in proper location, orientation, etc., in the NS. Placement of regulatory elements and CSs is KITA. Typically, operably linking of a promoter and CS(s) means that the promoter and transcriptional initiation or start sequence are positioned 5′ to the CS, such that the promoter can carry out its intended function. A promoter is operably associated with CS(s) if the promoter DOS affects transcription of the CS(s). Other transcription control elements, besides a promoter, for example enhancers, operators, repressors, & transcription termination signals, also can be operably associated with CSs DOS modulating processes relating to transcription, delivery of NAMs to targets, etc. Regulatory elements incorporated in constructs are primarily, generally, or entirely operable in TR(s) to which they are to be administered. In the context of this invention that means in one or more alphaherpesvirus infectable vertebrates. In one context, the regulatory sequences are operable in and the expressible sequences expressible in 2+ or 3+ species. In AOTI, one of the species includes humans. In AOTI, the regulatory sequences are operable in and the sequences are expressible in one or more non-human companion or livestock animals, such as dogs, horses, or chickens. In AOTI, the sequences are expressible in is an even toed ungulate, such as a swine.

[0178] NAMs can include NSs outside of the expression cassette, such as backbone elements. Such elements can provide further possibility to improve the therapeutic efficacy of a NAM. Potentially beneficial additional NAM elements include functional regions to remove immunogenic sequences as well as sequences that mediate nuclear import of the plasmid, prolonged expression, and self-partitioning. Such aspects are DFEH or KITA.

[0179] Additional NAM elements may be positioned upstream (5′) or downstream (3′) of CSs/expression cassettes. Examples of such elements include UTRs, Kozak sequences, oligo(dT) sequence(s), detectable tags, or multiple cloning sites. In aspects, a 5′ UTR and/or a 3′ UTR region flanks the CS(s). Multiple 5′ or 3′ UTRs may be included in the flanking regions and may be the same or of different sequences. As DEH, regulatory element(s) can be substituted with any suitable fragment, homolog, or variant thereof, such as a codon optimized regulatory element or a FF (e.g., a minimized CMV promoter). E.g., a portion of the above-described flanking regions of a construct may be codon optimized and any may independently contain one or more different structural or chemical modifications, before and/or after codon optimization.

[0180] In AOTI, constructs comprise intron(s). Introns are KITA as NSs that when transcribed, e.g. as part of a gene, are biochemically removed (“spliced”) from the transcript by the splicesome prior to translation of the transcript. Intron(s) containing splice donor and acceptor sites can be incorporated in constructs (SFE Chapman et al., Nuc. Acids Res. (1991) 19:3979-3986). In cases, an element classified as another type of regulatory element can comprise 1+ introns. E.g., both EF1α and CAG promoters can comprise intron(s). However, variants of such elements that are still functional and lack introns are also sometimes available and can be incorporated into constructs of the invention. For example, a minimized version of EF1α lacking any intron sequence is available. In some aspects, introns can be associated with detectably improved mRNA processing, increased transgene expression, or both. In AOTI, the constructs incorporate one or more introns that are associated with such other elements. In AOTI, constructs incorporate one or more introns that are independent (separate) of any other regulatory elements.

[0181] In AOTI, constructs comprise EEI(s). Despite the significant amount of work encompassed within the Wistar Art, such disclosures provide no disclosure or suggestion that inclusion of EEI(s) is important to the performance of gDAgFP-encoding constructs. Thus, the Wistar Art does not teach or suggest any such aspect of the invention. Such aspects of the invention are further described in the following section and other portions of this disclosure.

### iii. Introns/Intron-Mediated Expression Enhancement

[0182] As noted above, in AOTI constructs comprise 1+ EEI(s). An “expression-enhancing intron” is an intron associated with DOS or several-fold increase in mRNA processing, transgene expression, or both. Increased measures of expression that result from the inclusion of an expression-enhancing intron in constructs of the invention can be due to increases in the amount of mRNA expression, increased levels of translatable mRNAs in the cytoplasm, or CT. EEI(s) AOA can be CB a DOS or several-fold increased rate of nuclear export to the cytosol, transcript stability, transcription initiation, transcription re-initiation, transcript elongation, transcript accuracy, polyadenylation, or CT.

[0183] Phrases such as “several-fold increased,” “several-fold improved,” and “several-fold enhanced” here are used to refer to a condition, event, etc., in which the measured result (here, EEI-associated CS/EPES expression) is enhanced by at least two fold (200%), e.g., ≥3 fold (at least 300% or at least 3×), ≥four-fold, ≥five-fold, ≥six-fold, ≥seven-fold, ≥eight-fold, or at least ten-fold, at least 15-fold, at least 20-fold, or even at least 25-fold, or more, which are, e.g., levels of enhancement of expression that can be achieved with inclusion of an expression-enhancing intron in the constructs of the invention. In aspects, EEI(s) of a construct increases expression of the associated coding sequence (e.g., on average or as reflected by a median amount) by about 125% to about 750%, e.g., about 150% to about 600%, e.g., about 175% to about 600%, about 200%-about 550% or about 250%-about 550%.

[0184] Except where explicitly indicated or clearly indicated by context, “improved” herein means “increased.” In some aspects, “improved” means “reduced,” such as in respect of toxicity of a CEPESC.

[0185] In AOTI, constructs comprise one or more expression-enhancing introns that are part of a larger regulatory element, such as a promoter, enhancer, or combined promoter/enhancer region. One example of such a construct is a construct that comprises a CAG promoter, which is composed of a CMV IE enhancer sequence; the promoter, first exon, and first intron of the chicken beta-actin gene, and the splice acceptor of the rabbit beta-globin gene.

[0186] In aspects, constructs comprise EEI(s) that are independent of any other regulatory elements (e.g., are not part of a promoter or enhancer), at least as such elements are defined in respect of the construct (such an exclusion does not exclude placement of the intron in a 5′ or 3′ UTR). E.g., constructs provided herein can comprise a CMV Intron A sequence, such as SEQ ID NO:8 or SEQ ID NO:9 or a FV that is VRHROSI to either thereof, which may be included in a construct with a CMV enhancer, e.g., SEQ ID NO: 7 or a similarly related variant thereof, a CMV promoter, e.g., SEQ ID NO:6, a FF, or a FV thereof, or both, neither of which comprises a CMV Intron A sequence.

[0187] In AOTI, constructs comprise one or more “intronic cassettes.” The phrase “intronic cassette” is used to refer to a polynucleotide sequence comprising an intron as well as one or more other elements, e.g., one or more splice donor sequence(s), one or more splice acceptor sequence(s), a G triplet sequence, a pyrimidine-rich tract, a consensus branch point sequence, etc., that promote out-splicing of the intron, or combinations of any or all thereof.

[0188] A splice donor sequence, also known as a 5′ splice site, is a sequence that typically flanks the 5′ end of an intron, and typically comprises an AG dinucleotide. A splice acceptor sequence, also typically known as a 3′ splice site, is a sequence that typically flanks the 3′ end of the intron, and typically comprises a GC dinucleotide. Any splice donor sequence and splice acceptor sequence may be used in an intronic cassette. For example, splice donor and acceptor sequences may be splice donor and acceptor sequences that flank an intron normally found in nature. Alternatively, the splice donor and acceptor sequences may be optimized splice donor and acceptor sequences, e.g. they may comprise a 5′ exonic splicing enhancer (ESE) and/or a 3′ exonic splicing enhancer (ESE) (SFE Fairbrother W G, et al. Predictive identification of exonic splicing enhancers in human genes. Science 297: 1007-1013, (2002)) such as ATCTTC and CTGAAG, respectively. As another example, an intronic cassette may comprise a G triplet sequence, e.g. gggccgggCCTgggccgggTCCgggccggg (SEQ ID NO:7) (McCullough A J, Berget S M (1997) Mol Cell Biol 17: 4562-4571). Intronic cassette(s) may comprise a sequence, or “tract,” rich in pyrimidines, e.g, a tract of 5-20 or 8-15 pyrimidines, e.g. 10-13 pyrimidines (Coolidge C J, et al. (1997) Nucleic Acids Res 25: 888-896). Intronic cassette(s) may comprise a consensus branch point sequence (BPS), e.g. yUnAy (y being any pyrimidine, n being any nucleotide) encoded by yTnAy, e.g. CTGAC. (Gao et al. (2008) Nucleic Acids Res. 36(7):2257-2267). Intronic cassette(s) may comprise a number of sequences that exogenous to the CS, other regulatory elements, or both.

[0189] In AOTI, the constructs include 1+ EEI(s) that enhance expression even in the absence of DOS splicing. In aspects, constructs comprise one or more EEI(s) that detectably associate with U1 snRNA. In AOTI, one or more expression-enhancing introns of a construct associate with U1 snRNA and exhibit splicing-related enhancement of expression.

[0190] In aspects, constructs include at least a portion, such as at least a 5′ portion, of one or more introns that are first introns in their native (i.e., endogenous, naturally occurring) sequences. CMV Intron A is an example of such an intron. First introns or FFs thereof, such as 5′ fragments thereof, often can exhibit intron-mediated expression enhancement over other introns, at least with a typically DOS higher frequency of success.

[0191] In AOTI, at least one intronic cassette is operably linked to the same promoter that will mediate the expression of CS(s), e.g., a gDAgFPES. In other words, in such constructs expression cassette(s) that comprises the transgene of interest in such aspects also comprise intronic cassette(s). In such instances, intronic cassette(s) can be located in any configuration relative to the CS. E.g., intronic cassette(s) may be located upstream, or 5′, of the CS, i.e. between the promoter and the initiation codon for the CS. As another example, intronic cassette(s) may be located within a transgene, i.e. flanked by two exons of a CS. As another example, the intronic cassette may be located downstream of the transgene, e.g., if the transgene does not comprise a termination sequence, the intronic cassette may be placed downstream of the transgene coding sequence and upstream of an exogenous termination, e.g. polyadenylation, sequence. As another example, the intronic cassette may be separated from the transgene by an IRES sequence. In other instances, the intronic cassette of the subject vectors is under the transcriptional control of a promoter that is different than the promoter that will mediate expression of the transgene. In other words, the expression cassette that comprises the intronic cassette may not comprise the transgene of interest, but rather, will be a separate expression cassette from the one that comprises the transgene.

[0192] An example of an expression-enhancing intron that can be incorporated/used in constructs of the invention is the EF-1α first intron, which is described in, e.g., Lee, C., Ko, A. M., Chiang, S. et al. Regulatory elements in vectors containing the ctEF-1α first intron and double enhancers for an efficient recombinant protein expression system. Sci Rep 8, 15396 (2018). https://doi.org/10.1038/s41598-018-33500-0. Another expression-enhancing intron is the SV40 intron (SFE Xu, D.-h., Wang, X.-y., Jia, Y.-1., Wang, T.-y., Tian, Z.-w., Feng, X. and Zhang, Y.-n. (2018), SV40 intron, a potent strong intron element that effectively increases transgene expression in transfected Chinese hamster ovary cells. J. Cell. Mol. Med., 22: 2231-2239. doi:10.1111/jcmm.13504). Additional expression-enhancing introns that might be included in constructs of the invention include the MVM intron (minute virus of mice) and the human factor IX intron and variants thereof, such as truncation variants (SFE Kurachi S, Hitomi Y, Furukawa M, Kurachi K. Role of intron I in expression of the human factor IX gene. J Biol Chem. 1995; 270(10):5276-5281. doi:10.1074/jbc.270.10.5276). Synthetic/artificial expression-enhancing introns also are known in the art and can be incorporated into constructs (see., e.g., Lu J, Williams J A, Luke J, Zhang F, Chu K, Kay M A. A 5′ Noncoding Exon Containing Engineered Intron Enhances Transgene Expression from Recombinant AAV Vectors in vivo. Hum Gene Ther. 2017; 28(1):125-134. doi:10.1089/hum.2016.140 and Lu J, Zhang F, Kay M A. A mini-intronic plasmid (MIP): a novel robust transgene expression vector in vivo and in vitro. Mol Ther. 2013; 21(5):954-963. doi:10.1038/mt.2013.33). The use of expression-enhancing intron IV of the human NPY receptor Y1 and variants thereof also has been described in the art and also or alternatively can be used in some constructs of the invention. SFE WO2000063404.

[0193] In AOTI, EEI(s) comprise hybrid intron(s). Expression-enhancing hybrid introns include the adenovirus SD intron/Immunoglobulin heavy chain SA intron, the β-globin SD/immunoglobin heavy chain SA intron, & the SV40 late SD/SA intron (SFE Yew N S et al. Hum Gene Ther. 1997; 8(5):575-584. doi:10.1089/hum.1997.8.5-575 and Wu Z, et al. Mol Ther. 2008; 16(2):280-289. doi:10.1038/sj.mt.6300355). Another such expression-enhancing intron is the βGI-IgG intron (SFE US 20110217695).

[0194] In AOTI, EEI(s) comprise CMV intron(s). In AOTI, EEI(s) comprise HCMV Intron A, a FF, or a FV (e.g., a highly related, closely related, or substantially identical variant thereof) (a “CMV Intron A sequence”). For example, a CMV Intron A sequence can comprise a deletion variant, wherein 10-600 nt of the WT Intron A sequence are removed. In AOTI, the CMV Intron A variant exhibits increased expression-enhancement as compared to EL WT CMV Intron A. An example of such a CMV Intron A deletion variant ATAOTI is described in, e.g., Quilici L S et al. Biotechnol Lett. 2013; 35(1):21-27. doi:10.1007/s10529-012-1043-z. In AOTI, constructs comprising only a single intron are provided. In some cases, only one CMV intron is included in a construct. In one example, the only intron sequence in the construct is a CMV Intron A sequence (or “Intron A sequence”). In AOTI, at least a portion of the CMV IE first exon is also included in a construct. In AOTI, the CMV IE first exon or portion thereof is the only CMV IE exon in the construct. In AOTI, such a construct comprises a CMV promoter, CMV enhancer, or both, as well as an Intron A sequence. In AOTI, constructs comprise a promoter that is at least partially heterologous to the CMV Intron A sequence, such as an RSV promoter or a CAG promoter. Examples of such constructs are described in U.S. Pat. No. 6,893,840 & US20120142056. EEIs are further described in, e.g., Buchman et al., Molec. Cell. Biol. (1988) 8:4395-4405; Chapman et al., Nuc. Acids Res. (1991) 19:3979-3986; & Simari, R. D et al. Mol Med 4, 700-706 (1998). https://doi.org/10.1007/BF03401764.

[0195] Constructs can comprise a CMV promoter, DEH, and 1+ introns heterologous to CMV. E.g., constructs can comprise NS(s) in which Intron A of CMV is substituted with a heterologous intron. Examples of such constructs are described in, e.g., US20090130126. Constructs comprising a CMV Intron A sequence may include CMV IE exons, such as all or part of exon 1 or exon 2. Examples of such constructs comprising a CMV promoter and heterologous introns are described in, e.g., Nott A et al. RNA. 2003; 9(5):607-617. doi:10.1261/rna.5250403.

[0196] In AOTI, ≥1 intron/EEI is located 5′ to the associated coding sequence. In AOTI, ≥1 intron/EEI is also or alternatively located 3′ to the end of the associated coding sequence. In AOTI, at least one intron/EEI is contained with a CS. In AOTI, at least one, most, generally all, substantially all, or all of the introns included in the construct are located within 1-200 nt, such as 1-100 nt, 1-75 nt, 1-60 nt, 10-60 nt, 20-60 nt, 30-60 nt, 25-55 nt, 35-55 nt, or 5-55 nt of the coding sequence (sequence end to sequence end).

[0197] In AOTI, constructs comprise 2 introns/EEIs. In AOTI, constructs AOA comprise at least one intron that is positioned internal to a coding sequence. For example, in one aspect the invention provides a construct comprising a sequence according to the formula intron1—gD-encoding sequence 1 (gD1) (coding for an N-terminal fragment of gD or a variant thereof)—coding sequences for antigenic sequence(s)—gD encoding sequence 2 (gD2, a C-terminal gD fragment or variant thereof)—intron 2—gD3 (corresponding to a second gD1 sequence, which may be the same or different from the first gD sequence)—antigenic sequence(s) coding region 2.

### iii. Scope of Referenced Regulatory Elements and Variations in Definitions Thereof

[0198] As KITA, there is variability in the usage of terms such as promoters and enhancers ITA and either or both types of elements can comprise expression-enhancing introns depending on such definitions. Thus, for example, it may be possible to characterize a sequence as a promoter while others skilled in the art may characterize the sequence as comprising, e.g., a promoter & enhancer or promoter & intron. For example, SEQ ID NO:5 comprises a sequence described as a CMV promoter incorporated into exemplary plasmids used in the Examples of TD, but this sequence has significant overlap with SEQ ID NO:6 and SEQ ID NO:7, identified as comprising the CMV promoter and enhancer sequences, respectively (SFE https://www.snapgene.com/resources/plasmid-files/?set=basic_cloning_vectors&plasmid=CMV_promoter). As another example of the possible variation in the definition of well-known regulatory elements, GenBank Accession No. M60321 defines CMV Intron A as corresponding to SEQ ID NO:8, whereas in the exemplary plasmids provided in the Example CMV Intron A is identified as associated with SEQ ID NO:9, which overlaps (is identical to) SEQ ID NO:8 for 825 nt (of 956 nt). Unless explicitly stated or clearly contradicted herein, all known functional forms of the referenced regulatory element herein are to be considered included by the reference, as well as FVs thereof that are at RVRHROSI to any such known forms of the referenced regulatory element(s). E.g., references to CMV Intron A herein include SEQ ID NO:9, SEQ ID NO:8, and FVs thereof that act as EEIs and are RVRHROSI to either SEQ ID NO:8, SEQ ID NO:9, or both sequences. Still other authors characterize CMV as comprising a “promoter/enhancer region” comprising binding sites for several different transcription factors, a complex enhancer, four exons, and three introns, intron A being the largest thereof. SFE Chapman et al., Nuc. Acids Res. (1991) 19:3979-3986 for the sequence and structure of this region in hCMV strain Towne, and Akrigg et al., Virus Res. (1985) 2:107-121, for a description of the corresponding region in hCMV strain AD169. Still others ITA describe the use of HCMV IE1 “minimal promoters,” which may be, e.g., defined as a fragment of the HCMV IE1 promoter region capable of functioning as a promoter, driving transcription from the natural transcription start site (e.g., a fragment of the HCMV IE1 gene comprising nucleotides −116 to +1 (the HCMV IE1 transcription start site)). Thus, references to a CMV promoter or enhancer, e.g., can be construed as alternatively but simultaneously and implicitly encompassing all of these elements, generally, but also specific portions of such elements as defined by, e.g., the specific CMV promoter and enhancer sequences referenced in this paragraph or DEH (including in the various references incorporated herein).

### 2. Other Non-Coding Sequences

[0199] NSs can comprise other types of non-coding nucleotide sequences besides regulatory elements. For example, where a nucleotide sequence is a vector the nucleotide sequence can include “backbone” sequences, as DEH. Non-coding sequences also can include restriction enzyme sites, also DEH.

### a. Immunostimuatory Nucleotide Sequences

[0200] One type of noncoding sequence that can be incorporated into NAM(s) of CEPESC(s) is a noncoding immunostimulatory nucleotide sequence (ISNS). Examples of ISNS KITA include sequences that exhibit a CpG or UpA nucleotide pattern. Typically, ISNS(s) induce DOS IR(s) in TR(s).

[0201] In AOTI, CEPESCs comprise CpG sequence(s) recognized by IC(s), e.g., innate IC(s) or ITIC(s), e.g., by binding an ICR or an ITICR. In AOTI, a CEPESCs include NAM(s) comprising CpG NS(s) that binds a DC receptor (DCR). In AOTI, the DCR is DEC-205. In AOTI, NAM(s) comprise class B CpG ODN. In AOTI, CpG sequence(s) in NAM(s) DOS enhances uptake of the NAM by ITICs, e.g., DCs. In one such aspect, the NAM is optionally associated with a transfection-facilitating agent (TFA), such as a calcium phosphate (CaPNP) nanoparticle, which also or alternatively can detectably or significantly enhance uptake of the nucleic acid by DCs. Examples of such CpG ODNs are described in, e.g., Lahoud M H et al. Proc Natl Acad Sci USA. 2012; 109(40):16270-16275. doi:10.1073/pnas.1208796109.

[0202] CEPESCs AOA can include UpA-rich nucleotide sequences that can DOS induce IR(s), reduce NAM stability, or both. Such sequences are described in, e.g., Fros J J et al. Elife. 2017; 6:e29112. doi:10.7554/eLife.29112. Additional types of immunostimulatory NSs that can be incorporated into CEPESCs are KITA. Examples include AU-rich sequences, CA- and CT-repeat sequences, (GTA)CATCC(CTA) motif sequences, U(C/G)U or U(U/A)N and (A/U)CG(A/U) motifs, U-rich RNA sequences, GAAAGACC motifs, and (C/T)(A/T)TTGT(T/C)ATG CAAAT motifs. SFE Vabret N et al. Trends Immunol. 2017; 38(1):53-65. doi:10.1016/j.it.2016.10.006. Related PMCs are described in, e.g., Mutwiri G, et al. Adv Drug Deliv Rev. 2009; 61(3):226-232. doi:10.1016/j.addr.2008.12.004; Tanne A et al. Proc Natl Acad Sci USA. 2015; 112(49):15154-15159. doi:10.1073/pnas.1517584112; Verfaillie T et al. Vet Immunol Immunopathol. 2005; 103(1-2):141-151. doi:10.1016/j.vetimm.2004.09.016; Coban C et al. J Leukoc Biol. 2005; 78(3):647-655. doi:10.1189/jlb.1104627; Klinman D M, et al. Immunol Rev. 2004; 199:201-216. doi:10.1111/j.0105-2896.2004.00148.x; Reidel I G et al. Vet Immunol Immunopathol. 2019; 212:1-8. doi:10.1016/j.vetimm.2019.04.011; & Ito H et al. J Viral Hepat. 2017; 24(2):155-162. doi:10.1111/jvh.12629. Additional PMCs ATAOTI are descrbed in, e.g., U.S. Pat. Nos. 8,871,436, 9,522,958, 8,968,749, 9,566,292, & 10202606; US Patent Publication Nos. US20190134190, US20190100756, US20180264105, US20200085931 & US20110300164; International Patent Application Nos. WO2016152767, WO2018179172, & WO2019160866; Australian Patent Application AU2019200943A1; & Chinese Patent Applications/Patents CN106490361, CN108486120, CN103127501, CN103435690, CN109091671, CN109350739, CN110042103,&CN110218729.

### b. Other Sequences Effecting Expression and Expression Products

[0203] In aspects, NS(s) can comprise one or more sequences that impact expression or expression products, but which may not be traditionally or ordinarily considered regulatory elements. Examples of such sequences include splicing-related sequences, internal ribosome entry sites (IRESs—SFE Gritsenko A A et al. PLoS Comput Biol. 2017; 13(9):e1005734. doi:10.1371/journal.pcbi.1005734), etc. Examples of such NS are DEH.

[0204] One example of such a sequence is a scaffold/matrix attachment region (S/MAR). S/MARs can be incorporated into DNA sequences, such as DNA vectors, to facilitate a once-per-cell-cycle replication to maintain the vector as an episome in daughter cells. Typically, to confer function as an episome, an S/MAR sequence will be encoded downstream of an actively transcribed gene. E.g., a ˜2 kb S/MAR from the human β-interferon gene cluster, can generate a persistent non-integrating lentiviral vector in dividing cells. In AOTI, a S/MAR-containing nucleic acid vector, such as a minicircle vector, can result in an increase in stably maintained transfected cells after 10, 30, 40, 45, 50, 60, 75, or even ≥90 days or more post transfection, of at least about 25%, at least about 33%, at least about 50%, at least about 2× (100%), at least about 3×, at least about 5×, at least about 10×, at least about 15×, or even at least about 20× cells (compared to control). Similarly, constructs can comprise viral replication genes KITA that similarly confer the ability of an associated NAM to replicate in certain cells.

[0205] Additional examples of noncoding sequences include nuclear localization signals, ribosome binding sites, and insulators (sequences that allow for binding of transcription-related proteins, such as proteins that prevent structural changes in the associated nucleic acid or that otherwise control transcription). Any combination of such sequences AOA can be included in NAMs. Examples of such sequences are KITA.

### c. Nucleotide Sequence Spacers

[0206] NAMs can comprise NSs that at least in part exhibit no function other than creating space between other NSs. Such “spacer” sequences can comprise elements that exhibit regulatory sequence functions, exhibit other functions, or that are nonfunctional besides separating NSs. Examples of such sequences include, e.g., 3′ and 5′ untranslated regions (UTRs), DEH. However, whether such a spacer sequence comprises one or more functional sections or not, spacer sequences can sometimes be associated with effects such as enhanced expression, nucleic acid stability, and the like, merely by the presence of the spacer sequence. NAMs can comprise any suitable number of noncoding regions/spacers, such as UTRs or more intergenic spacers (IGSs) located between CSs/expression cassettes in a NAM. Each spacer can be, e.g., about 10-1000 nt, e.g., ˜20-800 nt, e.g., ˜30-600 nt, ˜40-400 nt, or about 50-250 nt, but longer or shorter spacers also can be acceptable.

[0207] Additional examples of noncoding/spacer NSs include nucleic acid vector backbones and also “stuffer sequences,” which are noncoding sequences used to achieve a certain size of vector for efficient packing, such as in adenoviral vectors. Stuffer sequences can comprise, e.g., 1-10 kb of noncoding sequences, such as 2-10, 2-7, or 2-5 kb of noncoding sequences.

### 3. Coding Sequences (CSs) and Expression Products (EPs)

[0208] NAM(s) of CEPESC(s) comprise CS(s)/EPES(s). A “coding sequence” (sometimes abbreviated CDS, aka a “coding region”) means a portion of a NAM which comprising codons translated, directly (in the case of mRNA), or indirectly (in the case of DNA), into AARs. Most CSs result in production of PPTs, though DNAs can in some cases AOA produce RNA end products. Typically, terms such as “express” or “expression” typically refers to the process to produce an RNA or PPT, including transcription and translation.

[0209] Although a “stop codon” (TAG, TGA, or TAA) is not translated into an AAR, it may be considered part of a coding region, but typically any flanking sequences, for example promoters, ribosome binding sites, transcriptional terminators, and the like, which may be part of the construct, are not considered part of the CS. Most coding regions are derived from and share similarity to genes, which are usually defined as heritable, usually organism genomic protein-coding sequences. However, the usage of “gene” has often been extended in the art to encompass synthetic coding sequences and other gene-like structures. As such, the term “gene” and related terms such as “transgene” herein should be understood as typically being synonymous with a coding sequence, unless otherwise indicated or clearly contradicted.

[0210] Another related term that often is similarly used in the art, but that sometimes differs in scope, is “open reading frame” (abbreviated “ORF”). Where not otherwise indicated, the term ORF herein also should be construed as equivalent to a CS, though there are cases where an ORF may not actually be a CS. An ORF is typically construed as a contiguous stretch of codons flanked by an in-frame start codon on the 5′ side and an in-frame stop codon at the 3′ side. In this respect, an ORF is similar to a CDS; however, an ORF may or may not encode a PPT (e.g., an ORF may not be preceded by the appropriate translation initiation signals or in the case of DNA-encoded ORFs, transcriptional signals). The concept of an ORF was developed as a means for identifying genes, but, as indicated, an ORF does not necessarily correspond to a CDS. That said, because the terms are often used interchangeably, ORFs should be, unless indicated otherwise, herein construed as being equivalent to a CDS.

[0211] No part of the disclosure is intended to limit the scope of any of these terms as they might be understood in the art. Numerous complicating factors extend the ability of coding sequences, ORFs, and genes in ways that do not correspond to typical descriptions provided above. For example, a DNA coding sequence can lead to the production of an RNA, which may not be translated to a polypeptide, but still can act as a functional biomolecule in a cell. Moreover, because there can be different reading frames, it is possible for a sequence to comprising overlapping ORFs and CDSs. Also, noncoding sequences, such as introns, add another layer of complexity, in that an ORF at an RNA level may only exist at the level of a processed (spliced) mRNA. In this context, an mRNA level ORF can be equivalent in some cases with an exon (a region of an immature mRNA that is retained after splicing). Even processed exons & such mRNA ORFs are not necessarily CSs.

[0212] As stated above, coding sequences are sequences that encode a polypeptide. Terms such as “protein,” “peptide,” and “polypeptide” (PPT) herein typically mean any peptide-linked chain of at least 2 AAs (typically at least five, ≥6, ≥7, or ≥8 AAs), joined to each other by peptide bonds or modified peptide bonds. Thus, as used herein, the terms refer to both short polymers (chains) of AARs, which are also commonly referred to in the art as peptides, oligopeptides, & oligomers, for and to longer chains of amino acid residues, which generally are referred to in the art as polypeptides or proteins. Proteins can include one chain or multiple associated chains. Thus, in a general sense “polypeptides” discussed herein can include, for example, homodimers, or heterodimers. A subunit of a polypeptide can be considered a “sequence,” “region,” or “domain,” of a PPT. In contexts, the term “domain” is used to identify distinct part of a polypeptide having one or more unique functional or structural properties, such as a tertiary structure. However, unless specifically indicated usage of the term “domain” herein should be construed identically with “amino acid sequence” (which is often simply shorted to “sequence” where context is clear that the sequence is a chain of amino acid residues).

[0213] As DEH, CSs contained in a single CDS/ORF, associated with the same regulatory elements, also can be described as being “operatively linked.” Such operatively linked NSs may be directly linked, i.e., the 3′ end of the first polynucleotide is directly adjacent to the 5′ end of the second sequence with no intervening nucleic acids. Alternatively, 2+ CSs of a construct may be indirectly linked by intervening NTs/NSs. E.g., intervening NSs may be noncoding or may encode an amino acid sequence, for example a peptide linker, DEH.

[0214] PPT EPs may undergo processing in COEs. Unless otherwise stated or indicated, any PPT/AARS described herein will comprise all forms of the AARS/PPT WRT possible posttranslational modifications (e.g., acetylation, phosphorylation, glycosylation, sulfatation, amidation, proteolysis, sumoylation, prenylation, etc.). In AOTI, post-translational site(s) are removed in FVs of referenced WTC PPTs, as DEH. As indicated in the Principles of Construction, terms such as “polypeptide” used herein should be understood to include both the singular “polypeptide” as well as plural “polypeptides.” A single coding sequence may result in 2, 3, 4 or more separate PPTs due to processing. AOTI comprising CSs processed to produce separate PPTs are provided & DFEH.

[0215] In aspects, ≥2 CSs, such as ≥3 CSs, are present in a single NAM, e.g., on a single plasmid. In aspects, ≥2 CSs are in different constructs in a single CEPESC, e.g., on separate (different) plasmids. Both types of CEPESCs are AOTI, as will be clear from other portions of this disclosure. Most PPTs in compositions/methods OTI are produced by recombinant technology.

[0216] Amino acids that make up polypeptides and amino acid sequences described herein can be referred to herein by either their commonly known three letter symbols (e.g., “Gly” for glycine) or by the one-letter symbols recommended by the IUPAC-IUB Biochemical Nomenclature Commission (e.g., “A” for alanine). Thus, the 20 natural amino acids and their abbreviations follow conventional usage herein. The amino acid sequences and polypeptides disclosed herein will typically consist of, consist essentially of, substantially consist of, or generally consists of natural amino acid residues.

[0217] However, stereoisomers (e.g., D-amino acids) such as a,a-disubstituted amino acids, N-alkyl amino acids, lactic acid and other unconventional amino acids may AOA be suitable components for the polypeptides and sequences disclosed herein and, where suitable, replace indicated related AAs. Examples of unconventional amino acids include but are not limited to selenocysteine, citrulline, omithine, norvaline, 4-(E)-butenyl-4(R)methyl-N-methylthreonine (MeBmt), N-methyl-leucine (MeLeu), aminoisobutyric acid, statine, N-methyl-alanine (MeAla). Amino acid residues of a sequence or polypeptide also or alternatively can be substituted by suitable acid analogs, derivatives, and amino acid mimetics that function in a manner similar to the naturally-occurring amino acids (e.g., e.g., hydroxyproline, y-carboxyglutamate, and O-phosphoserine, homoserine, norleucine, methionine sulfoxide, and methionine methyl sulfonium). Sequences and polypeptides described herein with respect to naturally occurring amino acid residues will be understood as providing simultaneous disclosure for variants in which any suitable number of such naturally occurring amino acid residues are replaced with amino acid derivatives, analogs, mimetics, or unconventional amino acid residues. PPTs also can comprise, where suitable, synthetically derived derivatives of referenced PPTs, e.g., PEGylated derivatives, & other derivatives.

[0218] As most AOTI relate to constructs, AAs that make up PPTs encoded by such constructs will typically be those that are available for translation and, thus, typically GCO, SCO, or consist of naturally occurring amino acid residues. Methods also have been recently developed for the incorporation of rare amino acids other than the twenty naturally occurring amino acids that are nonetheless produced by recombinant expression (SFE WO2018039438A1).

[0219] In some aspects, PPTs described herein may be components of useful compositions or used in methods. In such aspects, derivatized amino acids, such as those described above, may be incorporated into such PPTs.

[0220] In aspects, it an be useful to number PPTs or AARSs of CEPs/compositions in order to distinguish such sequences or polypeptides. As such, terms such as “first amino acid sequence” & “second amino acid sequence” in description of a PPT or otherwise are not meant to require a specific order of the sequences in orientation, time of expression, etc. As is also the case with NAMs, discussion of “different polypeptides” or “different amino acid sequences” will be understood not to mean actual individual molecules or sequences, unless clearly indicated, but, rather, refer to individual types of such molecules or sequences, which will can and typically will be present in at least hundreds, thousands, tens of thousands, hundreds of thousands of copies, or even more copies in the relevant composition.

### i. Naturally Occurring Sequences

[0221] In AOTI, ≥1, at least some, primarily most, generally all, substantially all, or all NSs of a CEPESC (a) encode PPT(s) that are “naturally occurring,” (b) are “naturally occurring” polynucleotide sequences, or both.

[0222] As used herein, terms such as “naturally occurring” or “naturally-occurring” as applied to a sequence or biomolecule (e.g., a polynucleotide or polypeptide), refer to a sequence or a molecule having a sequence, respectively, that occurs naturally (i.e., in natural organisms). E.g., a NS encoding a naturally occurring gD sequence means a nucleotide sequence that expresses a gD sequence that occurs in alphaherpesviruses that occur naturally (e.g., a nucleotide sequence that encodes a gD polypeptide sequence found in a herpes simplex virus, e.g., HSV-1 or HSV-2).

[0223] The term “naturally occurring” also can be applied to fragments (FFs) of biomolecules found in nature and, accordingly, reference to a “naturally occurring” or WT sequence should be understood, unless contradicted by context or explicit indication, to encompass any suitable fragment of such a referenced biomolecule, examples of which are provided in this disclosure (e.g., a naturally occurring HVEM-binding sequence/domain of a HSV-1 gD). Terms such as “wild-type” (sometimes “wild type”), natural, or endogenous are similarly used here and, accordingly, should be interpreted similarly. However, “wild type” sequences do not have to be obtained from natural sources, but, rather, encompass any sequences that correspond in composition to a sequence that occurs in nature, whether or not such sequences are synthetic or produced by synthetic materials or comprised within synthetic constructs, such as from recombinant or synthetized polynucleotides.

### ii. Variants

[0224] In general, for any referenced polypeptide, polynucleotide, or sequence thereof described or referenced herein, functional fragments, functional variants (ORT as FVs or variants), and homologs of such polypeptides or polynucleotides, and sequences, can be used in place of referenced biomolecules/sequences. Accordingly, any referenced biomolecule or sequence herein should be interpreted as also implicitly disclosing corresponding aspects in which any suitable homolog, functional fragment, or variant thereof are incorporated or used in place of the referenced biomolecule or sequence.

[0225] Suitability of FFs, variants/FVs, or homologs is typically determined by composition/structure as a referenced biomolecule or sequence, maintenance of some or all of the functions of the referenced biomolecule or sequence, at an appropriate level, and usually both. Functional aspects of FVs and FFs that define suitability are discussed below and such considerations are used in the art in defining homologous sequences (e.g., what sequences should be characterized as alphaherpesvirus glycoprotein D sequences).

[0226] Unless otherwise indicated any reference to a PPT, NS, or AARS here should be understood to also include FVs/variants of the referenced polypeptide or sequence (each of which being usually just referred to as a “variant” or FV), even though in many parts of this disclosure there is explicit reference to variants of certain polypeptides and sequences.

[0227] A “variant” (“functional variant” or FV) means a PPT, NS, NAM, or AARS which is substantially similar in structure and at least similar in one or more respects in terms of biological activity to a referenced protein, domain, or sequence. Polypeptide variants and amino acid sequence variants include PPTs and AARSs, respectively, that differ from a native form of a polypeptide or amino acid sequence because of one or more deletions, insertions, or substitutions of amino acid residues. Substitutions may further be defined as conservative or unconservative substitutions, as described further below.

[0228] Variants herein encompass synthetic/artificial sequences that are similar to one or more WT sequences and typically the term “variant” will refer to such sequences. However, in some cases, as will be exemplified below, the scope of what defines suitable variants can include FFs and vice versa.

[0229] Because the function of biomolecules, particularly for polypeptides and amino acid sequences, the degree of “identity” between constituents of sequences (nucleotides or amino acid residues) in an optimal alignment is KITA as a suitable indicator of relatedness in defining a reasonable scope for variants that can be reasonably expected to exhibit suitable, similar, or improved function(s). FVs will typically exhibit a level of identity to the reference sequence(s) to at least be considered related (as defined below), if not very related, highly related, or substantially identical. Alternatively, the scope of suitable variant PPT/AARS can be defined based on “similarity” in the composition of AARSs. Specifically, variants will typically have a sequence that AOA is “similar,” if not very similar, highly similar, or compositionally equivalent (as defined below). Thus, polypeptides and amino acid sequences specifically described in connection with AOTI (e.g., human EAT-2), will be understood to simultaneously implicitly disclose FVs defined by identity (being at least related or VRHROSI) or similarity (by being at least similar or VSHSOCE), except where explicitly contradicted. E.g., description of a construct encoding human EAT-2 also implicitly discloses constructs encoding FVs of EAT-2 that are RVRHROSI to human EAT-2 and variants that AOA have sequences that are SVSHSOCE to human EAT-2, and which, in either case, exhibit 1+ EAT-2 function(s) at a suitable, similar, or improved level in TR(s). Thus, references to specific PPTs here, e.g., CMV intron A, human EAT-2, HSV-1 gD, HSV-2 gD, and the like, also implicitly encompass FVs (and FFs) of such referenced PPTs. In general, In AOTI, any of the named elements of the invention can be replaced by a FV that exhibits at least one corresponding function to a referenced biomolecule in a functionally relevant, such as clinically relevant, manner, and exhibit a similar composition, e.g., by being characterizable as having a sequence RVRHR or SI in terms of identity to the referenced PPT, NAM, AARS, or NS or that for a PPTs/AARS is characterizable as SVSHR or SCE to the referenced PPT or AARS. Thus, for example, the disclosure of a gD sequence herein made with reference to, e.g., a WT gD, such as HSV-1 gD or HSV-2 gD, will be understood as encompassing variants thereof, such as variants that are RVRHR or SI to the referenced AARS and that maintains OSMOA functions thereof (discussed below). Also included within the scope of acceptable variations for referenced gDS(s) are gD(s) that are SVSHS or SCE to a referenced gDS(s). Such FVs are exemplified below and constructs, compositions, and methods/compositions comprising such FVs constitute aspects of the invention.

[0230] Readers will also understand that any reference to a PPT, AARS, NAM, or NS herein similarly also implicitly provides corresponding disclosure for incorporation or use of a FF thereof. Fragments will typically exhibit 100% local identity to a referenced sequence. FFs will typically be large enough to provide suitable, comparable, or, in some cases, even improved functioning WRT to the EL WT referenced biomolecule/sequence. In aspects, FFs comprise ≥33%, ≥50%, ≥65%, ≥75%, ≥80%, ≥85%, or ≥90% of a EL WT biomolecule. However, in some aspects, as in the case of Ag(s), a FF can comprise only a small portion of an entire expression product (e.g., ˜5%, ˜7.5%, or ˜10%).

[0231] Reference to a PPT, AARS, NAM, or NS also implicitly provides support for aspects AOA including suitable homologs of the referenced sequence/molecule. Suitable homologs, however, often do not exhibit relatedness or similarity to referenced biomolecules/sequences, as DEH.

[0232] The degree of identity between 2+ NSs and 2+ AARSs is indicative of relatedness between such sequences. However, changes in the nucleotide sequence of a nucleotide sequence variant may not alter an encoded AARS due to genetic code degeneracy. As such, at least with CSs, relatedness of NSs may not be required to define what is a suitable substitution WRT WT NSs.

[0233] Examples of DIVs, such as GSVRs, are exemplified below WRT antigen sequence variants (AgV(s)) that can be applied to any AARS in CEPs. E.g., gDS(s), ITII(s), NGDCI(s), NANCIPI(s), PTPS(s), and other AARS(s) also can comprise DIVs (e.g., GSVR(s)). Other variations in such non-Ag AARSs can be made to change or enhance AARS functions.

### a. Enhanced NS Variants (e.g., Codon Optimized NS Variants)

[0234] In aspects, constructs comprise NS variants with enhanced properties/function(s), e.g., in terms of stability, expression, and the like. Thus, for example, in AOTI 1+ CSs, regulatory elements, or both, are optimized in terms of, e.g., resulting in detectably or significantly enhanced expression, typically significantly or clinically improving the functionality of the sequence/NAM (in the context of the present invention promoting, inducing, or enhancing an immune response). In AOTI, such enhancement is achieved through modifying a secretion signal (discussed further below), using codons for the most abundant transfer RNA (tRNAs) (codon optimization, discussed below), reducing impeding secondary structures on the resulting mRNA, introducing one or more expression-enhancing introns (a feature of the invention discussed in detail below), a combination thereof, or a combination of some or all thereof with various similar methods described in this disclosure, such as the inclusion of expression-enhancing regulatory elements, such as a strong promoter. In AOTI, such enhancement is further achieved through, e.g., increasing the number of genes encoding a polypeptide in a construct or composition (to two or more copies); increasing the transcription of the gene (such as by placing the gene under the control of a constitutive promoter, strong promoter, universal promoter, or a promoter that exhibits a combination of some or all of such features); increasing the translation of the gene through various methods described herein (e.g., association with an EEI, an enhancer, or a combination thereof); or a combination of these or other approaches.

[0235] In aspects, NS(s) AOA include other functionality-enhancing variations, e.g., variations that bias GC content to DOS increase mRNA stability or reduce secondary structures; minimize tandem repeat codons or base runs that may impair gene construction or expression; customize transcriptional and translational control regions; insert or remove protein trafficking sequences, remove/add post translation modification sites in encoded protein (e.g. glycosylation sites); add, remove or shuffle protein domains; insert or delete restriction sites; modify ribosome binding sites or mRNA degradation sites, to adjust translational rates or promote proper folding of EPs; or to reduce or eliminate problem secondary structures within the polynucleotide. In AOTI, the constructs of the invention comprise one or more codon optimized sequences that exhibit detectable improvements in one or more of such features.

[0236] In AOTI, optimization of a sequence comprises codon optimization of one or more parts of NS(s). As is KITA deviations CSs and regulatory element NSs are possible without changing the EP AW the CS. Regulatory sequences and codons, however, are both generally species dependent, so in order to maximize expression codons of CSs are preferably selected to be effective in TR(s). In AOTI, constructs comprise one or more codon optimized sequences for TR(s) (e.g., dogs, pigs, or humans), wherein the codon optimized sequence DOS increases expression; detectably or significantly reduces silencing or blocking of expression; or both.

[0237] Given the large number of gene sequences available for a wide variety of animal species, it is possible to calculate the relative frequencies of codon usage. Codon usage tables are readily available, for example, at the “Codon Usage Database” available at http://www.kazusa.or.jp/codon/ (Jul. 9, 2002), and these tables can be adapted in a number of ways. See Nakamura, Y., et al, Nucl. Acids Res. 28:292 (2000). Codon optimization tools, algorithms and services also are KITA, non-limiting examples include services from GeneArt (Life Technologies) or DNA2.0 (Menlo Park Calif.).

[0238] Any codon optimized sequence can be optimized to one or more degrees, for example a sequence can be “fully optimized” or “minimally optimized.” In AOTI, constructs comprise NSs having a different degree of codon optimization, either within a single construct, between constructs, between compositions, or between compositions and administrations. Alternating the amount of codon optimized sequences contained in a construct or composition or used in a method can result in optimized long-term results.

[0239] In aspects, NS(s) are subject to full optimization. When using the “full optimization” method, the term “about” is used to account for fractional percentages of codon frequencies for a given AA. As used in this respect “about” is defined as 1 AA more or 1 AA less than the value given. The whole number value of AAs is rounded up if the fractional frequency of usage is 0.5 or greater and is rounded down if the fractional frequency of use is 0.49 or less. Using again the example of the frequency of usage of leucine in human genes, for a hypothetical polypeptide having 62 leucine residues, the fractional frequency of codon usage would be calculated by multiplying 62 by the frequencies for the codons. E.g., 7.28% of 62 equals 4.51 UUA codons, or “about 5,” i.e., 4, 5, or 6 UUA codons, 12.66% of 62 equals 7.85 UUG codons or “about 8,” i.e., 7, 8, or 9 TUG codons, 12.87% of 62 equals 7.98 CUU codons, or “about 8,” i.e., 7, 8, or 9 CTU codons, 19.56% of 62 equals 12.13 CUC codons or “about 12,” i.e., 11, 12, or 13 CUC codons, 7.00% of 62 equals 4.34 CUA codons or “about 4,” i.e., 3, 4, or 5 CUA codons, & 40.62% of 62 equals 25.19 CUG codons, or “about 25,” i.e., 24, 25, or 26 CUG codons.

[0240] In AOTi, NS(s) are minimally optimized. In a “minimal optimization” approach, coding regions are only partially optimized. For example, the invention includes a nucleic acid fragment of a codon-optimized coding region encoding a polypeptide in which at least about 1%, 2%, 3%, 4%, 5%, 10%, 15%, 20%, 25%, 30%, 35%, 40%, 45%, 50%, 55%, 60%, 65%, 70%, 75%, 80%, 85%, 90%, 95% or 100% of the codon positions have been codon-optimized for a given species. That is, they contain a codon that is preferentially used in the genes of a desired species, e.g., a vertebrate species, e.g., humans, in place of a codon that is normally used in the native nucleic acid sequence. Codons that are rarely found in the genes of the vertebrate of interest are changed to codons more commonly utilized in the coding regions of the vertebrate of interest. This minimal human codon optimization for highly variant codons has several advantages, which include but are not limited to the following examples. Because fewer changes are made to the nucleotide sequence of the gene of interest, fewer manipulations are required, which leads to reduced risk of introducing unwanted mutations and lower cost, as well as allowing the use of commercially available site-directed mutagenesis kits, and reducing the need for expensive oligonucleotide synthesis. Further, decreasing the number of changes in the NS decreases the potential of altering the secondary structure of the NS, which can have a significant impact on gene expression in certain host cells. The introduction of undesirable restriction sites is also reduced, facilitating the subcloning of sequences into a suitable vector.

[0241] In general, any polynucleotide described herein and any general disclosure of a polynucleotide encoding a polypeptide, sequence, or a fragment may be codon optimized for mammals (e.g., humans, other primates, dogs, cats, horses, cows, pigs, or sheep; birds (e.g., ducks, geese, turkeys, or chickens); or any other TR or class of TR(s), e.g., non-HVEM TR(s). In AOTI, compositions and methods of the invention include delivery of a construct containing a sequence that is codon optimized for two or more species. For example, a human codon optimized sequence may be administered to a dog in the scope of the invention both in the preclinical development of a product for human applications and as a method of treatment in dogs.

### iii. Sequence Identity and Related Sequences

[0242] As DEH, FVs & FFs can be CB the degree their composition (sequence) is identical/related or similar to a reference biomolecule/sequence.

[0243] “Relatedness” in such AOTI refers to the amount of identity between sequences that form a FV/FF and a referenced biomolecule. For convenience, several levels of identity are defined in this section.

[0244] In a “potentially related” sequence ≥25% of the NTs or AAs of the FV/FF (e.g., at least 20%, 22%, 25%, 27%, or 29% of the nucleotides or residues) are identical to referenced (comparator) sequence(s) in an optimal alignment. Sequences are “likely related” if they exhibit at least about 45% sequence identity in such an alignment. Except for art-recognized homologs, discussed below, “potentially related” sequences typically are not within the scope of FVs generally encompassed by disclosure of a sequence/biomolecule. In general, sequences that exhibit less than about 25% identity can be characterized as “unrelated” to another sequence herein. However, homologs having such low levels of identity can often suitably substitute for each other (as can FFs or FVs of such homologs). For example, the gD homologs of alphaherpesviruses share only 22±33% amino acid identity according to Connolly et al. (Virology 280,7-18 (2001)). Thus, with respect to gDSs, homologs implicitly disclosed as alternative AOTI can exhibit relatively low levels of identity, provided that such sequences either are art-recognized homologs or suitable FFs/FVs of such homologs.

[0245] A sequence that is at least about 70% identical to one or more referenced sequences is “related” to such sequence or sequences. Such sequences are generally considered within the scope of what is implicitly disclosed herein when a passage refers to a particular sequence or biomolecule. A sequence is “very related” to one or more other sequences if it is at least about 80% identical to the referenced sequence or sequences or contains no more than 2 amino acid residue differences from the referenced sequence in sequences of less than about 10 residues. A sequence is “highly related” to a sequence or sequence if it exhibits at least about 90% sequence identity to such reference sequence or sequences or contains no more than 1 amino acid residue differences from the referenced sequence in sequences under 10 amino acid residues. Finally, a sequence is “substantially identical” if it shared at least about 96% identity to a referenced sequence or set of sequences.

[0246] References to sequence(s) or related sequences also provides implicit support for AARSs that are SVSHSOCE, or both SVSHSOCE & RVRHROSI to a referenced “related” sequence (e.g., a WTC). The term “similar” in connection with sequence(s) also provides implicit support for sequences that are SVSHSOCE to referenced AARS(s).

[0247] In describing FVs WRT WT AARSs/NSs disclosure may refer to AAs/NTs “corresponding” to AAs/NTs in the referenced WT sequence(s). A “corresponding” AA/NT can be located in a different position than the referenced AA/NT, can (if suitable based on context, plausibility, etc.) have a different composition than the referenced AA/NT, or both. E.g., an AA corresponding to WT AARS AA 100 can occur at position 85, 95, 105, or 110 in a FV and can be a different AA, such as a conservative substitution of the AA.

[0248] In the art, terms such as “percent homology” and “sequence similarity” are sometimes also used to indicate “identity.” In most aspects of this disclosure, however, “similarity” with respect to amino acid residues means the inclusion of compositionally similar amino acid residues, as is discussed below, and “homology” as described above herein relates to two or more sequences or biomolecules identified in the art as being homologs of one another (rather than as a particular degree of similarity).

[0249] As KITA, identity in the context of comparing sequences means the amount of sequence components (AAs or NTs) that match when the sequences are optimally aligned. Percent identity of sequences is generally described as the number of exact matches between two aligned sequences divided by the length of the shorter sequence and multiplied by 100. The “best sequence alignment” between two polypeptides is defined as the alignment that produces the largest number of aligned identical residues. Various approaches to aligning sequences and calculating identity based on factors such as permissible gap sizes are known in the art. Such different approaches can result in variation in identity scores. Typically, where sequences are at least highly related such differences are small (e.g., less than 5%, less than 3%, or less than 2%). Such differences are one reason why the term “about” is used to describe identity, as identity can be assessed by a variety of different tests.

[0250] A number of programs are KITA for making identity/similarity assessments, including the “Stretcher” and “Needle” alignment tools (which focus on global, pairwise alignments) that are freely publicly available over the internet through EMBL-EBI at https://embnet.vital-it.ch/software/LALIGN_form.html; the LALIGN program, available through, e.g., ExPASy at https://embnet.vital-it.ch/software/LALIGN_form.html (which focuses on local alignment of sequences); the UNIRPOT ALIGN tool (available at https://www.uniprot.org/align/), & the NCBI COBALT Constraint-based Multiple Alignment Tool (https://www.ncbi.nlm.nih.gov/tools/cobalt/cobalt.cgi). A number of proprietary programs also provide sequence alignment tools (e.g., the DNASTAR Lasergene Molecular Biology Suite (Madison, Wis., USA)). Multiple sequence alignment tools, such as the CLUSTAL line of programs also are well known in the art and are available through, e.g., ExPASy. In aspects, overall identity between 2 sequences is determined using the LALIGN program, BLAST, or both tools (taking an average thereof). Parameters used for AARS analysis using such tools are DEH. Where parameters are not provided or addressed herein the default settings for such tools are assumed to be selected.

[0251] Variant sequences can differ from referenced sequences by substitution(s) (changes in NT or AA at position(s)), deletions (where one or more NTs or AAs present in a referenced sequence are missing from the variant in the optimal alignment), or additions (where NTs or AAs are included in a variant but not present in the referenced counterpart). Additions can be characterized by either being insertions within the sequence or additions to either termini of the referenced sequence. Depending on context, each type of variation can be permissible and within the scope of implicitly disclosed variations of a referenced PPT. In aspects, additions ≥insertions in FVs.

[0252] Because variants can comprise deletions, the scope of FVs often includes FFs. For example, a disclosure of a 100 AA WT AARS will implicitly include suitable and “related” fragments of the sequence that are between 70 and 99 amino acids in length & larger fragments/extensions of the referenced sequence (if possible) of between 101 and 143 AAs. Thus, a “variant” includes FFs that can exhibit 100% local identity to a referenced sequence. Often such fragments may include an extra Met residue where a start codon has been introduced into the CS, resulting in a HR or SI FV comprising an identical FF.

### iv. Methods of Generating Variants

[0253] FVs can be generated by any suitable method. Numerous methods have been developed for the generation of suitable, similar, or even improved variants of polynucleotides and polypeptides in the art, which can be employed to generate variants within the scope of the disclosure provided herein.

[0254] In one example, variants of a referenced biomolecule or sequence can be made using mutagenesis techniques KITA. Alternatively, variants can be chemically synthesized. In other words, NS FVs can be introduced through mutation techniques, which are KITA, or by design of variant sequences that are generated through recombinant techniques or synthesis.

[0255] Variations/mutations can be made by or include, e.g., point mutations, deletions and/or insertions. Mutations and other types of variation can introduce changes in biological activity in resulting variants. E.g., a variant/mutant gD chimeric PPT encoded by a construct can have the ability to bind HVEM at a level that is the same as or greater than the ability of a wild type gD protein to bind HVEM. In one example, W294 of HVS-1 gD is replaced with Ala, resulting in enhanced HVEM binding. Other gDS FVs are DEH.

[0256] In AOTI, site-specific mutagenesis can be performed on a nucleotide sequence to generate variants of a referenced coding sequence or other functional nucleotide sequence. In one type of such a technique a site for introducing an amino acid may be predetermined, but the mutation per se not be predetermined. Site-specific mutagenesis methods are well known in the art and described in, e.g., Adelman et al., DNA 2:183 (1983) & Ausubel et al. CURRENT PROTOCOLS IN MOLECULAR BIOLOGY, J. Wiley & Sons, NY, N.Y., 1996, and such methods are described further herein and in references cited here.

[0257] Other “asexual-like” random, partially random, or directed mutagenesis/evolution methods, such as chemical mutagenesis, are known in the art. Examples of such methods include error prone PCR variant generation/mutagenesis, rolling circle error-prone PCR, targeting glycosylases to embedded arrays for mutagenesis (TaGTEAM), mutagenesis by random insertion and deletion, transposon based random mutagenesis, focused mutagenesis methods, site saturation mutagenesis, sequence saturation mutagenesis (SeSaM), single primer reactions in parallel (SPRINP), mega primed and ligase free focused mutagenesis, Q-PCR, PFunkel-ominchange-OSCARR, trimer-dimer mutagenesis, and cassette mutagenesis. Cassette mutagenesis is a type of site-directed mutagenesis that uses a short, double-stranded oligonucleotide sequence (gene cassette) to replace a fragment of target DNA. This technique uses complementary restriction enzyme digest ends on the target DNA and gene cassette to achieve specificity. Unlike many other site directed mutagenesis methods cassette mutagenesis also does not involve primer extension by DNA polymerase. The use of synthetic gene cassette allows total control over the type of mutation that can be generated. When studying protein functions, cassette mutagenesis can allow a scientist to change individual amino acids by introducing different codons or omitting codons. Cassette mutagenesis has been successfully applied to regulatory elements to generate more productive regulatory elements. Such methods are described in, e.g., Worrall, Andrew (1994). Methods in Molecular Biology. 30. Humana Press. pp. 199-210. doi:10.1385/0-89603-256-6:199. ISBN 978-1-59259-517-4. PMID 8004195 and Wells, J. A.; Vasser, M; Powers, D. B. (1985). Gene. 34 (2-3): 315-23. doi:10.1016/0378-1119(85)90140-4. PMID 3891521.

[0258] Thus, mutational methods of generating diversity include, for example, various known site-directed mutagenesis methods (SFE Ling et al. (1997). Anal Biochem. 254(2): 157-178; Dale et al. (1996) Methods Mol. Biol. 57:369-374; Smith (1985) Ann. Rev. Genet. 19:423-462; mutagenesis using uracil containing templates (Kunkel (1985) PNAS 82:488-492 & Kunkel et al. (1987) Methods in Enzymol. 154, 367-382). Other suitable methods for generating variants include oligonucleotide-directed mutagenesis methods (SFE Methods in Enzymol. 100: 468-500 (1983); Methods in Enzymol. 154: 329-350 (1987); & Zoller & Smith (1987) Methods in Enzymol. 154:329-350); phosphorothioate-modified DNA mutagenesis (Taylor et al. (1985) Nucl. Acids Res. 13: 8749-8764; Taylor et al. (1985) Nucl. Acids Res. 13: 8765-8787 (1985); & Sayers et al. (1988) Nucl. Acids Res. 16: 803-814); and mutagenesis using gapped duplex DNA (Kramer & Fritz (1987) Methods in Enzymol. 154:350-367; Kramer et al. (1988) Nucl. Acids Res. 16: 7207; and Fritz et al. (1988) Nucl. Acids Res. 16: 6987-6999).

[0259] Additional suitable diversity-generating methods include point mismatch repair (Kramer et al. (1984) Cell 38:879-887); mutagenesis using repair-deficient host strains (SFE Carter (1987) Methods in Enzymol. 154: 382-403), deletion mutagenesis (Eghtedarzadeh & Henikoff (1986) Nucl. Acids Res. 14: 5115), restriction-selection and restriction-purification (Wells et al. (1986) Phil. Trans. R. Soc. Lond. A 317: 415-423), mutagenesis by total gene synthesis (Nambiar et al. (1984) Science 223: 1299-1301; Sakamar and Khorana (1988) Nucl. Acids Res. 14: 6361-6372; and Grundström et al. (1985) Nucl. Acids Res. 13: 3305-3316); double-strand break repair (Mandecki (1986) PNAS, 83:7177-7181; and Arnold (1993) Current Opinion in Biotechnology 4:450-455). Additional details on many such methods can be found in Methods in Enzymology Volume 154. Other useful mutagenesis techniques include alanine scanning, or random mutagenesis, such as iterated random point mutagenesis induced by error-prone PCR, chemical mutagen exposure, or polynucleotide expression in mutator cells (SFE Bornscheueret et al., Biotechnol. Bioeng., 58, 554-59 (1998), Cadwell and Joyce, PCR Methods Appl., 3(6), S136-40 (1994), Low et al., J. Mol. Biol., 260, 359-68 (1996), Taguchi et al., Appl. Environ. Microbiol., 64(2), 492-95 (1998), & Zhao et al., Nat. Biotech., 16, 258-61 (1998)). Suitable primers for PCR-based site-directed mutagenesis or related techniques can be prepared by the methods described in, e.g., Crea et al., Proc. Natl. Acad. Sci. USA, 75, 5765 (1978).

[0260] Other useful techniques for promoting sequence diversity include PCR mutagenesis techniques (as described in, e.g., Kirsch et al., Nucl. Acids Res., 26(7), 1848-50 (1998), Seraphin et al., Nucl. Acids Res., 24(16), 3276-7 (1996), Caldwell et al., PCR Methods Appl., 2(1), 28-33 (1992), Rice et al., Proc. Natl. Acad. Sci. USA. 89(12), 5467-71 (1992) and U.S. Pat. No. 5,512,463), phagemid display techniques (as described in, e.g., Soumillion et al., Appl. Biochem. Biotechnol., 47, 175-89 (1994), O'Neil et al., Curr. Opin. Struct. Biol., 5(4), 443-49 (1995), Dunn, Curr. Opin. Biotechnol., 7(5), 547-53 (1996), and Koivunen et al., J. Nucl. Med., 40(5), 883-88 (1999)), reverse translation evolution (as described in, e.g., U.S. Pat. No. 6,194,550), saturation mutagenesis described in, e.g., U.S. Pat. No. 6,171,820), PCR-based synthesis shuffling (as described in, e.g., U.S. Pat. No. 5,965,408) and recursive ensemble mutagenesis (REM) (as described in, e.g., Arkin and Yourvan, Proc. Natl. Acad. Sci. USA, 89, 7811-15 (1992), and Delgrave et al., Protein Eng., 6(3), 327-331 (1993)). Techniques for introducing diversity into a library of homologous sequences also are provided in U.S. Pat. Nos. 6,159,687 and 6,228,639.

[0261] Protein design techniques can be used to develop PPT FVs. Protein design is the rational design of new PPTs to exhibit modified activity, behavior, composition, or purpose. Rational protein design approaches make protein-sequence predictions that will fold to specific structures. These predicted sequences can then be validated experimentally through methods such as peptide synthesis, site-directed mutagenesis, or artificial gene synthesis. Approaches to the development of variants that include rational protein design considerations/methods are often called “protein engineering.” Protein engineering includes knowledge-based mutagenesis (KBM), computational protein design (CPD), and directed evolution (DE). Two or all of KBM, CPD, and DE methods can be combined in designing FVs.

[0262] KBM applies biochemical principles and knowledge gained from prior studies to guide mutagenesis. E.g., knowledge concerning the regions of HSV-1 gD involved with binding of its receptors has led researchers to develop HSV-1 gD variants and fragments, which has resulted in the identification of gD fragments/variants with modified binding properties, including binding properties that are enhanced with respect to one or more receptors. SFE Rux A H, et al. J. Virology. 1998 September; 72(9):7091-7098 and Connolly S A et al. J Virol. 2005; 79(2):1282-1295. doi:10.1128/JVI.79.2.1282-1295.2005.

[0263] Directed evolution introduces desired properties into PPTs via random mutation or gene recombination. FVs with desired properties are then identified from these libraries through screening or selection. In its generic form, directed evolution lacks some of the de novo potential of computational design. However, DE can be applied to a protein without detailed knowledge of its structure or the detailed molecular mechanism required for its function. Unlike rational protein engineering, directed evolution provides an a priori approach toward the engineering of improved proteins and regulator elements. This minimally recursive technique builds upon small improvements by selecting and combining the best changes. Protein-protein interactions and other functions can be improved by thousands of times by such methods. Recombination of homologous genes is a powerful mechanism for generating sequence diversity, and homologous recombination techniques can be applied to generate variants, sometimes also employing protein analysis and directed evolution. DNA shuffling is a DE method that includes the creation of novel mutations as well as recombination. In vitro recombination methods such as DNA shuffling are very flexible and can give hybrid genes with multiple crossovers; they have been used extensively to evolve proteins with improved and novel properties. Recently in vivo recombination has been used to generate diversity for directed evolution, e.g., in creating a large phage display antibody library. When DNA shuffling is done between closely related genes (e.g., orthologs) instead of a set of mutant genes derived from a single gene, this technique is usually called DNA family shuffling. DNA family shuffling utilizes the naturally occurring genetic diversity of family genes as the driving force for in vitro evolution. DNA shuffling methods are known in the art and a large variety of such methods exist. Traditional DNA shuffling involves the digestion of a gene by DNaseI into random fragments, and the reassembly of those fragments into a full-length gene by primerless PCR: the fragments prime on each other based on sequence homology, and recombination occurs when fragments from one copy of a gene anneal to fragments from another copy, causing a template switch, or crossover event. Alternative methods use restriction enzymes that cut in similar places are used to digest members of the gene family and such DNA fragments are joined together with DNA ligase.

[0264] Such methods are often effective in generating suitable variants. In a noteworthy, early example of DNA shuffling, a family of 20 human interferon-alpha genes was shuffled followed by selection of antiviral and antiproliferation activities in murine cells, resulting in variants having 285,000-fold increased activity. The best chimeras generated by such methods were composed of up to five parental genes and contained no random point mutations. In another example, shuffling of 26 homologous protease genes generated many chimeric proteases that were significantly improved over any of the parental enzymes.

[0265] A variety of approaches to directed evolution methods, such as DNA shuffling are now known in the art and include random priming In vitro recombination (RPR), truncated metagenomic gene-specific PCR, staggered extension process (StEP) methods, random chimeragenesis on transient templates (RACHITT), mutagenic organized recombination process by homologous in vivo grouping (MORPHING), phage-assisted continuous evolution (PACE), exon shuffling, incremental truncation for the creation of hybrid enzymes (ITCHY), SCRATCHY methods, recombined extension on truncated templates (RETT), sequence homology-independent protein recombination (SHIPREC), sequence independent site directed chimeragenesis (SISDC), degenerate homo-duplex recombination (DHR), random multi-recombinant PCR (RM-PCR), user friendly DNA recombination (USERec) methods, Golden Gate shuffling (GGS) recombination, phosphoro thioate-based DNA recombination method (PRTec), Y-Ligation based shuffling (YLBS) methods, and methods involving mutagenesis PCR with dITP and fragmentation by endonuclease V, amongst others. Examples of such methods and other methods and related principles are described in, e.g., Stemmer in 1994 (Stemmer, Proc Natl Acad Sci USA 91, 10747-10751, 1994; Stemmer, Nature 370, 389-391, 1994); Werkman J R, Pattanaik S, Yuan L. Directed evolution through DNA shuffling for the improvement and understanding of genes and promoters. Methods Mol Biol. 2011; 754:325-342. doi:10.1007/978-1-61779-154-3_19; Kolkman J A, Stemmer W P. Directed evolution of proteins by exon shuffling. Nat Biotechnol. 2001; 19(5):423-428. doi:10.1038/88084; Whalen R G, Kaiwar R, Soong N W, Punnonen J. DNA shuffling and vaccines. Curr Opin Mol Ther. 2001; 3(1):31-36; Locher C P, Soong N W, Whalen R G, Punnonen J. Development of novel vaccines using DNA shuffling and screening strategies. Curr Opin Mol Ther. 2004; 6(1):34-39; and Feng H, Wang H Y, Zhao H Y. Novel Random Mutagenesis Method for Directed Evolution. Methods Mol Biol. 2017; 1498:483-490. doi:10.1007/978-1-4939-6472-7_32. Various directed evolution and other diversity generating methods are described in, e.g., U.S. Pat. Nos. 7,771,974; 5,605,793; 5,811,238; 5,830,721; 5,834,252; 5,837,458; WO 95/22625; WO 96/33207; WO 97/20078; WO 97/35966; WO 99/41402; WO 99/41383; WO 99/41369; WO 99/41368; EP 752008; EP 0932670; WO 99/23107; WO 99/21979; WO 98/31837; WO 98/27230; WO 98/27230; WO 00/00632; WO 00/09679; WO 98/42832; WO 99/29902; WO 98/41653; WO 98/41622; WO 98/42727; WO 00/18906; WO 00/04190; WO 00/42561; WO 00/42559; and WO 00/42560.

[0266] Another aspect of protein engineering that also or alternatively can be used to develop suitable variants is computation protein design. Computational protein design (CPD) uses molecular modeling programs to predict amino acid sequences that will fold into a desired structure. CPD can comprise generating protein design candidates by mutating residues on an existing high-resolution structure and then energetically evaluating the designs to find variants that are optimized for certain physicochemical properties such as protein stability or enzymatic activity. PPTs can be computationally designed from the level of AARS(s)/AA(s) to the level of a functional protein complex. Design targets range from increased thermo- (or other) stability to specific requested reactions such as protein-protein binding, enzymatic reactions, or nanotechnology applications. The design scheme may encompass small regions of the proteins or the entire protein. In either case, the design may aim at the side-chains or at the full backbone conformation. There have been several recent successful examples of successful rational design of water-soluble and even transmembrane peptides and proteins, in part due to a better understanding of different factors contributing to protein structure stability and development of better computational methods. A second very important engineering target is enzyme thermostability. Homology modeling & rational evaluation of PPT structure has been useful in identifying stabilized FVs

[0267] Descriptions of a variety of diversity generating procedures for generating modified nucleic acid sequences that encode variant polypeptides of the invention or other variant nucleotide sequences of those specific sequences described herein are found in the following publications and the references cited therein: Soong, N. et al. (2000) Nat Genet 25(4):436-439; Stemmer, et al. (1999) Tumor Targeting 4:1-4; Minshull and Stemmer (1999) Current Opinion in Chemical Biology 3:284-290; Patten et al. (1997) Current Opinion in Biotechnology 8:724-733; Stemmer (1996) “Sexual PCR and Assembly PCR” In: The Encyclopedia of Molecular Biology. VCH Publishers, New York. pp. 447-457; Stemmer (1995) “The Evolution of Molecular Computation” Science 270: 1510; Nature. 491 (7423): 204-5. Bibcode:2012Natur.491.204H. doi:10.1038/491204a. PMID 23135466; Samish I. Methods Mol Biol. 2017; 1529:3-19. doi:10.1007/978-1-4939-6637-0_1; Chica R A. Protein Sci. 2015; 24(4):431-433. doi:10.1002/pro.2656; Tobin P H et al. Curr Drug Metab. 2014; 15(7):743-756. doi:10.2174/1389200216666141208151524; Lutz S, Iamurri S M. Methods Mol Biol. 2018; 1685:1-12. doi:10.1007/978-1-4939-7366-8_1; Wang P L. Dis Markers. 2000; 16(1-2):3-13. doi:10.1155/2000/596468; Samish I. Methods Mol Biol. 2017; 1529:21-94. doi:10.1007/978-1-4939-6637-0_2; & Giver L, et al. Curr Opin Chem Biol. 1998; 2(3):335-338. doi:10.1016/s1367-5931(98)80006-9.

[0268] Any suitable combination of deletion, insertion, & substitution modifications can be used to arrive at a FV, provided the variant retains at least one intended/required activity at a suitable, comparable, or improved level.

[0269] As noted above, amino acid sequence insertions include amino and/or carboxyl-terminal fusions of from 1+ AAs to PPTs of essentially unrestricted length, as well as intrasequence insertions of 1, 2, or 2+ AARs. Intrasequence insertions (i.e., insertions within the sequence of a wild-type polypeptide or sequence) can range generally from, e.g., about 1 to 15 residues, about 1-10 AAs, 1-7 AAs, 1-5 AAs, or 1 to 3 residues (e.g., per every about 200 residues, every 150 residues, every 125 residues, or every 100 residues). Variation by intrasequence deletions or by a combination of deletions & insertions typically is limited to a similar proportion of variation. Variation by intrasequence substitutions may be possible with a higher level of change (e.g., about 1-25 residues, about 1-20 residues, about 1-15 residues, about 1-10 residues, or about 1-5 residues), particularly where substitutions primarily comprise, GCO, or CO conservative substitutions (DFEH).

[0270] PHOSITA will understand principles applicable to generation of FVs. For example, cysteine and methionine residues are KITA to be susceptible to rapid oxidation in some peptides and multiple cysteines located in a peptide are susceptible to forming structure-changing disulfide linkages. N-terminal glutamine residues can be unstable, because such a residue can form cyclic pyroglutamate under acidic conditions. Aspartic acid can undergo hydrolysis and cause peptide cleavage under acidic conditions when paired with glycine, proline or serine. Multiple serine or proline residues in a sequence can cause significant deletions during synthesis, especially proline residues, which can undergo cis/trans isomerization and reduce peptide purity. A series of glutamine, isoleucine, leucine, phenylalanine, threonine, tyrosine or valine can cause p sheets. From the foregoing it will be understood that substantial changes in function can be made by selecting substitutions that are less conservative than those shown in the defined groups, above. For example, non-conservative substitutions can be made which more significantly affect the structure of the peptide in the area of the alteration, for example, the alpha-helical, or beta-sheet structure; the charge or hydrophobicity of the molecule at the target site; or the bulk of the side chain.

[0271] Substitutions expected to produce significant changes in a PPTs properties include those where 1) a hydrophilic residue, e.g., seryl or threonyl, is substituted for (or by) a hydrophobic residue, e.g., leucyl, isoleucyl, phenylalanyl, valyl, or alanyl; 2) a Cys or Pro is substituted for (or by) any other residue; 3) an AA having an electropositive side chain, e.g., lysyl, arginyl, or histidyl, is substituted for (or by) an electronegative AA, e.g., glutamyl or aspartyl; or 4) an AA having a bulky side chain, e.g., phenylalanine, is substituted for (or by) an AA that does not have a side chain, e.g., Gly.

[0272] These and other nonconservative substitutions can be introduced into peptide variants where significant changes in function/structure is desired and avoided where conservation of structure/function is desired. Accordingly, in some aspects, variants having some or all of the above-described features can be excluded from the scope of suitable variants.

### v. Homologs

[0273] As noted above, “homologs” are another group of molecules and sequences that can often be expected to suitably, substantially similarly, or improvingly substitute for a referenced biomolecule or sequence in AOTI. Accordingly, homologs are generally considered implicitly disclosed by disclosure of a referenced polypeptide, amino acid sequence, or nucleotide sequence herein, unless the disclosure clearly indicates otherwise.

[0274] Homologs are polypeptides, polynucleotides, and respective sequences of each, which occur in natural organisms (e.g., vertebrates, viruses, bacteria, etc.). A homolog of a reference polypeptide can naturally occur in the same species or different species/type of organism than the species/type in which the reference sequence is naturally produced.

[0275] A homolog of a biomolecule can be any suitable biomolecule that is currently identified as a homolog of the referenced biomolecule or that will similarly be identified as a homolog in the future based on the structural and functional analysis that has led to the identification of currently known homologs. A homolog of a sequence that is a functional fragment of a biomolecule is a corresponding sequence from a homolog to a reference sequence, such as a corresponding domain, e.g., the transmembrane domain of a gD polypeptide, the nectin-1 binding domain of gD homologs, and the like.

[0276] Examples of well-known homologs include human growth hormone (hGH) and bovine growth hormone (bGH); insulin-like growth factors (IGFs), bone morphogenic proteins (BMPs), and insulins, but also include polypeptides that characterize aspects of this invention such as gD polypeptides (e.g., HSV-1 gD and HSV-2 gD are homologs), HVEM, and EAT-2 polypeptides (e.g., murine EAT-2 and human EAT-2), to name a few examples. In the context of this disclosure, a suitable homolog to a referenced biomolecule/sequence typically will exhibit a suitably similar structure and at least some common functionality.

[0277] It is important to note that a “homolog” in the context of this disclosure does not necessarily mean that the homologous sequences share true “homology,” in terms of evolutionary origin, particularly since the demonstration of such homology is extremely difficult, if not impossible, in most cases. A “homolog” herein can include, e.g., orthologs, paralogs, an allelic variant, and other “cognates” or counterparts of a referenced biomolecule or sequence found in other organisms of a species or other species from which a referenced molecule or sequence originates.

[0278] Like suitable variants, a suitable homolog included within the implicit or explicit scope of disclosure of an aspect of the invention herein that refers to a particular reference biomolecule or reference sequence will, unless otherwise indicated, include one or more common functions with a referenced sequence at a suitable, comparable, or improved level of ≥1 function(s). As such, some paralogs of biomolecules would not be considered “homologs” in this disclosure (e.g., where such paralogs lack any common function).

[0279] In addition to arising from genetic relatedness, exemplified above, homologs can arise from alternate mRNA splicing events or from alternative proteolytic cleavage of a naturally occurring/endogenous polypeptide. Alternate splicing of mRNA may, for example, yield a truncated but biologically active protein, such as a naturally occurring soluble form of the protein.

[0280] Variations attributable to proteolysis that may result in homologs in or between species include, for example, differences in the N- or C-termini upon expression in different types of host cells, due to proteolytic removal of one or more terminal amino acids from the protein (e.g., from 1-5 terminal amino acids). PPTs in which differences in amino acid sequence are attributable to genetic polymorphism (allelic variation among individuals producing the protein) also can account for homologs within a species or population.

[0281] Some homologs that are sufficiently related to a sequence or biomolecule may fall within the scope of what is a suitable variant. In such cases, homologs within the scope of the definition of a variant can be both classified as both homologs and variants of a sequence or biomolecule. In other words, these terms do not have to be exclusive.

[0282] Similar structure and function of polypeptides is typically used to determine homology in the art. It should be, once again, noted that while there is a strong correlation between a determination of homology and sequence identity, homologs can, in some cases, exhibit relatively low levels of identity, and still be classified in the art as being homologs. For example, although sequences of the ribosomal protein L36 in different species exhibit considerable diversity in sequence, and only a single amino acid residue is conserved in all such sequences, they still have structures that clearly align, have similar functions, and, thus, are considered to be well-established homologs. As such, there is no minimum sequence identity or similarity requirement for defining a “homolog,” and the best defining characteristic is recognition in the art of homology based on overall similar of structure, even if identity is relatively low, and some overlap in function (though, as noted below, the function of recognized homologs can differ in part).

[0283] Like FVs, homolog substitutes for referenced NSs are not limited to CSs, but can include regulatory sequences, e.g., promoters or EEIs.

[0284] In AOTI, constructs having features described herein are replaced with a homolog of a referenced sequence(s). E.g., HSV-1 gD sequences described herein can be replaced with a corresponding gD sequence from HSV-2 gD, a variant of an HSV-1 gD sequence, or a gD sequence from a type of alphavirus that typically infects other hosts, such as a chicken (Gallus HV gD), a horse (e.g., EHV-1 gD), a cow (e.g., BHV-1 gD or BHV-5 gD), or a pig (e.g., PRV gD). E.g., described HSV-1 gD constructs that comprise a soluble form of gD lacking a TMD can be replaced with a corresponding soluble portion of a mature HSV-1 gD homolog (e.g., a soluble PRV gD or EHV-1 gD, such as in an aspect where a construct encoding AAs 26-340 of HSV-1 gD (SEQ ID NO:82) is replaced with the homologous sequence consisting essentially of AAs 31-357 of Gallid Alphaherpesvirus-2 (GenBank Accession No. AAA64967.1)).

[0285] In aspects, one or more sequences encoded by constructs are homologs of corresponding sequences endogenous to the intended host/subject species or to a virus that infects the intended host/species. For example, In AOTI, methods comprise use of constructs that encode one or more HSV-1 gD sequences which are administered to dogs, pigs, or cats, as opposed to the gD sequences of viruses that normally infect such species.

### a. Chimeras

[0286] Although the term “chimera” is sometimes used in the art to refer to any fusion protein, in TD terms such as “chimera” or “chimeric sequence” are used to refer to molecules and sequences, respectively, that are fusion proteins that comprise 2 or more sequences MCRT different WT sequences that are homologs of one another. Such sequences/molecules also are sometimes referred to as “hybrids” or “hybrid sequences.”

[0287] In AOTI, the invention provides constructs encoding gD PPTs that comprise chimeric sequence(s), e.g., formed from a HSV-1 gD sequence and an HSV-2 gD sequence (e.g., the HVEM binding domain of the HSV-1 gD sequence is replaced with corresponding residues from HSV-2 gD or the HVEM-binding domain of HSV-1 gD or a substantially identical or highly related variant is fused with sequences corresponding to most, generally all, substantially all, or all of the portion of HSV-2 gD that are located downstream of the portion of HSV-2 gD that corresponds to the HVEM-binding domain of the fusion protein). An example of such a chimera is a gDP comprising AAs ˜26 to 55 of HSV-1 gD and AAs ˜56-393 of HSV-2 gD or residues ˜56-340 of HSV-2 gD. Fusion proteins comprising sequences from, substantially identical to, or at least highly related to any two or more (e.g., 3, 4, or 5) of the naturally occurring gD polypeptides discussed herein or other homologs thereof can be included in such chimeric fusion proteins. Thus, for example, gD chimeras can be formed from the fusion of gD sequences from chicken and turkey alphaherpesviruses; dog and cat alphaherpesviruses; human and horse alphaherpesviruses; human, dog, and cat alphaherpesviruses; and the like.

### vi. Additional Characteristics of Variants, Homologs, and Fragments

[0288] In aspects, FVs are CB similarity in AARS composition, similar structure, or both. In aspects, FVs comprise sequences related in identity and similar in composition to a WTC (and AOA have a confirmed similar structure).

### a. Compositional Similarity & Conservative Substitutions

[0289] FVs can comprise conservative or non-conservative AA substitutions, deletions, or additions, or CT with respect to referenced sequence(s) (e.g., a WT EL PPT, such as an EAT-2 PPT). Typically, most, generally all, or substantially all of such substitutions will be conservative substitutions. Typically, the amount of deletions or “gaps” between AAs in FVs WRT to WTCs will be limited (e.g., to 5%≤, 3%≤, or under 2% of total AAs).

[0290] Substitutions with similar AAs (conservative substitutions) often can lead to comparably functional FVs. In cases where most of the differences between a variant polypeptide or sequence and a referenced polypeptide or amino acid sequence are defined by conservative amino acid substitutions, the variant can be considered to have a “similar” sequence or composition. Thus, for example, even though one or more variants may have a percent identity that would only indicate it is “potentially related” to the one or more reference sequences or polypeptides in question, it or they may be sufficiently similar to a referenced sequence or biomolecule to exhibit a similar, if not enhanced, function as compared to the referenced biomolecule or sequence.

[0291] Like identity, “similarity” can be determined by amino acid comparison of two or more polypeptides or sequences in an optimal alignment, which can be based on either the best identity alignment, as provided by the various above-described alignment tools or similar tools in the art, or by other tools used for making assessments in the art, where “similar” amino acid residues are either identical or determined by one or more standards to possess similar chemical and/or physical properties that are relevant to the structure and functioning of the amino acid sequence, such as charge or hydrophobicity. There are a number of standards in the art for grouping substitutions to determine what is a conservative substitution. Examples of such grouping and related principles are described in, e.g., US20160151478. Such groupings can help those of skill in the art to design or characterize similar variants.

[0292] A “percent similarity” can be determined between 2+ compared PPTs/AARSs using such tools or manual calculation using principles KITA or DEH. As with assessing sequence identity, approaches can lead to variation in the amount of identity, but, highly similar sequences will tend to have similar similarity scores, regardless of the approach taken to assess similarity. Because of such variations, use of the approximator “about” in connection with most measures of similarity values is appropriate.

[0293] It can be useful to define certain aspects based on levels of “similarity” between AARSs. In this disclosure a “similar” amino acid sequence exhibits at least about 75% amino acid similarity to a reference sequence in an optimal alignment. A “very similar” amino acid sequence is composed of at least about 85% similar amino acid residues to one or more reference amino acid sequences. A “highly similar” sequence is composed of at least about 92% similar residues to one or more reference amino acid sequences. A “substantially compositionally equivalent” is composed of at least about 98% amino acid residues that are similar (conserved) WRT to a referenced AARS.

[0294] Alignment tools such as those described above for determining identity also often have the capability of determining similarity between sequences. For example, the LALIGN program (currently available at https://embnet.vital-it.ch/software/LALIGN_form.html & https://www.ebi.ac.uk/Tools/psa/lalign/) will compare two sequences on the basis of both residue identity and similarity in an optimal alignment. The BLAST 2 sequences tool available at http://140.114.98.75/blast/wblast2.html will produce alignments with identity and “positives” scores, which can be used in place of similarity scores generated by LALIGN or an average of the two can be used where analysis with either tool is suitable. These tools can also be substituted with similar analytical tools available ITA.

[0295] A scoring matrix used to assess similarity can impact the similarity score between two sequences obtained through such tools. As such the settings in the following Table 1 are used to assess identity or similarity with amino acid sequences of different lengths—

| Sequence | Substitution | Gap | Extension |
|---|---|---|---|
| Length (AAs) | Matrix | Penalty | penalty |
| <35 | PAM-30 | 9 | 1 |
| 35-50 | PAM-70 | 10 | 1 |
| 50-85 | BLOSUM-80 | 10 | 1 |
| 85 | BLOSUM-62 | 10 | 1 |

[0296] Alternative methods for analyzing shorter amino acid sequences that may be suitable used in place of this method are described in, e.g., Pearson W R. Selecting the Right Similarity-Scoring Matrix. Curr Protoc Bioinformatics. 2013; 43:3.5.1-3.5.9. doi:10.1002/0471250953.bi0305s43.

[0297] The disclosure of any referenced sequence or polypeptide also implicitly provides support for variants that are at least related (in terms of identity), or at least at least similar (or VSHSOCE) to the referenced sequence or polypeptide. Thus, for example, a reference to a particular EAT-2 polypeptide in a method or composition will, unless clearly contradicted, be understood to also implicitly provide corresponding disclosure of the use of EAT-2 variants that are SVSHSOCE thereto used in place of the referenced EAT-2 polypeptide. For example, the reference to human EAT-2 in an aspect would implicitly provide support for the use of human EAT-2 variants that comprise a similar sequence to EAT-2, which would include, for example, its murine homolog (which exhibits 88.6% similarity according to LALIGN and 81% positives according to BLAST (analyzed by BLAST 2 SEQUENCES)).

[0298] In some cases, such similar variants may also exhibit a high enough level of identity to a referenced polypeptide or sequence to be considered related in terms of sequence identity, as well as similar in terms of sequence similarity. Thus, for example, such polypeptide and sequences that are implicitly disclosed should be considered to include polypeptides and sequences that are at least related in identity to the referenced sequence or polypeptide and also similar, very similar, highly similar, or substantially compositionally equivalent to the referenced biomolecule or sequence. For example, full length HSV-2 gD may implicitly substitute full length HSV-1 gD as it exhibits about 82% sequence identity and about 93% similarity according to LALIGN analysis using the above-described settings and 78% identity and 84% positives according to BLAST using the same settings. Thus, even under the more stringent of these two tests these homologs would both be considered “related” in terms of identity and at least “similar” (highly similar according to LALIGN and very similar if taking an average of LALIGN and BLAST data).

[0299] Other statistical tools in the art also or alternatively can be used to characterize similarity between two or more sequences. Examples of such tools are bit scores and E-values, which are, for example, reported as outputs of analysis by BLAST tools. The Expect value (E or E-value) is a parameter that describes the number of hits one can “expect” to see by chance when searching a database of a particular size. The lower the E-value, the less likely that a match is a result of random chance and therefore the more significant a match. A sequence alignment that has an E-value of 0.05 means that the detected level of similarity between the sequences has a 5 in 100 (1 in 20) chance of occurring by chance alone. An E-value>10e−100 usually also or alternatively indicates the compared sequences are identical, substantially identical, or substantially compositionally equivalent. At 10e−50<E-value<10e−100, the sequences also or alternatively can be considered highly similar. At 10e−10<E-value<10e−50, the sequences also or alternatively can be considered to be very similar. At 10e−6<E-value<10e−10 the sequences also or alternatively can be considered similar sequences. For example, murine and human EAT-2 exhibit an E-value of 1 e−62 when compared by BLAST (using BLAST 2 Sequences), indicating that on this criteria these polypeptides are “highly similar.” Skilled artisans recognize that E-values are very dependent on the query sequence length and the database size. Short identical sequence may have a high E-value and may be regarded as “false positive” hits. As such, the use of E-values may be limited to sequences of more than 40 amino acid residues, more than 50 amino acid residues, more than 60 amino acid residues, or more than 100 amino acid residues. E-value measurements are also provided in other types of sequence comparisons, such as comparisons of sequences with domains in domain databases, as DEH.

[0300] The bit score, which is another output of BLAST analysis tools and other bioinformatics sequence analysis software programs, gives an indication of how good an alignment is between two sequences. The higher the score, the better the alignment. In general terms, this score is calculated from a formula that takes into account the alignment of similar or identical residues, as well as any gaps introduced to align the sequences. Thus, the bit score is dependent on the “substitution matrix” used in the analysis of the sequences (e.g., BLOSUM62, BLOSUM50, PAM70, or PAM30). A bit score of 175 or higher also or alternatively can indicate that two sequences are highly similar (e.g., an alignment of golden monkey and human EAT-2 sequences has a bit score of 248 with 99% identity), a bit score of 125-175 also or alternatively can indicate two sequences are at least very similar (e.g., an alignment of murine EAT-2 and human EAT-2 is associated with a BLAST bit score of 173 at 65% identity and 81% positives), and a bit score of 75-125 can at least indicate that two sequences are similar.

[0301] Other conservative substitutions, e.g., involving substitutions of entire regions having similar hydrophobicity characteristics, are well known, and can be considered within the broader context of determining amino acid sequence similarity. Thus, changes that can be considered “conservative” can further be classified, in part, by considering the hydropathic index of amino acids, as understood in the art. Kyte et al., J. Mol. Biol. 157:105-132 (1982). The hydropathic index of an amino acid is based on a consideration of its hydrophobicity and charge. It is KITA that AAs of similar hydropathic indexes can be substituted and still retain protein function. In AOTI, AAs having hydropathic indexes of 2 counterpart AAs are substituted for counterpart AAs. The hydrophilicity of amino acids can also be used to reveal substitutions that would result in proteins retaining biological function. A consideration of the hydrophilicity of amino acids in the context of a peptide permits calculation of the greatest local average hydrophilicity of that peptide, a useful measure that has been reported to correlate well with antigenicity and immunogenicity. Substitution of amino acids having similar hydrophilicity values can result in peptides retaining biological activity, for example immunogenicity, as is understood ITA. Substitutions can be performed with amino acids having hydrophilicity values within 2 of each other. Both the hydrophobicity index and the hydrophilicity value of amino acids are influenced by the particular side chain of that amino acid. Consistent with that observation, amino acid substitutions that are compatible with biological function are understood to depend on the relative similarity of the amino acids, and particularly, the side chains of those amino acids, as revealed by the hydrophobicity, hydrophilicity, charge, size, and other properties. Related principles for some polypeptides that may comprise surface-exposed and non-exposed, interior residues are known in the art (SFE Moelbert S, Emberly E, Tang C. Correlation between sequence hydrophobicity and surface-exposure pattern of database proteins. Protein Sci. 2004; 13(3):752-762. doi:10.1110/ps.03431704). Tools for such analysis are also available in the art. For example the ProtScale tool (available at https://web.expasy.org/protscale/) allows users to analyze a sequence on the basis of hydrophobicity (several different ways), bulkiness, and polarity, and to also perform several structural analyses.

[0302] In AOTI, conservation in terms of hydropathic/hydrophilic properties also is substantially retained in a variant polypeptide or sequence as compared to a referenced (parent) peptide of sequence (e.g., the weight class, hydropathic score, or both of the sequences are at least about 50%, at least about 60%, at least about 70%, at least about 75%, at least about 80%, at least about 85%, at least about 90%, at least about 95%, or more (e.g., about 65-99%) retained). Methods for assessing the conservation of the hydropathic character of residues/sequences are known in the art and incorporated in available software packages, such as the GRAVY program (available at http://www.gravy-calculator.de/) and the GREASE program (formerly available through the SDSC Biology Workbench) (see also, e.g., Kyte and Doolittle et al., J. Mol. Biol. 157:105-132(1982); Pearson and Lipman, PNAS (1988) 85:2444-2448, and Pearson (1990) Methods in Enzymology 183:63-98 for a discussion of the principles incorporated in GRAVY, GREASE, and similar programs).

### 1) Hybridization of Similar Poynucleotides

[0303] Compositional similarity in NSs can AOA be assessed through NAM hybridization techniques KITA. In NAM hybridization, a nucleic acid probe typically is chosen that is complementary to a target NS, and then by selection of appropriate conditions the probe and the target sequence “selectively hybridize,” or bind, to each other to form a hybrid molecule. A NA capable of hybridizing selectively to a target sequence under “moderately stringent” typically hybridizes under conditions that allow detection of a target nucleic acid sequence of ≥˜10-14 nucleotides in length having at least approximately 70% sequence identity with the sequence of the selected nucleic acid probe. Stringent hybridization conditions typically allow detection of target NSs of at least about 10-14 nucleotides in length having a sequence identity of greater than about 90-95% with the sequence of the selected nucleic acid probe.

[0304] Hybridization conditions useful for probe/target hybridization where the probe and target have a specific degree of sequence identity, can be determined as is known in the art (see, for example, NUCLEIC ACID HYBRIDIZATION: A PRACTICAL APPROACH, B D Hames and S J Higgins, Eds. (1985) Oxford; Washington, D.C.; IRL Press). Hybridizing nucleotide sequences can be useful, for example, with respect to naturally occurring homologs of a particular reference sequence that can be considered implicitly provided by and within the scope of a disclosed sequence, such as a non-coding sequence (e.g., an expression-enhancing intron, a promoter, or an enhancer). Nucleic acid hybridization methods are KITA (SFE Sambrook et al., 2001, Molecular Cloning, A Laboratory Manual, Cold Spring Harbor Press, N.Y.; and Ausubel et al., 1989, Current Protocols in Molecular Biology, Green Publishing Associates and Wiley Interscience, N.Y). PHOSITA will be able to set appropriate stringency conditions to assess whether sequences meet a threshold level for hybridization that is indicative of an at least minimum level of similarity.

[0305] For example, hybridization may be carried out under moderate to stringent conditions, to the complement of a DNA encoding a native caspase peptide. Moderate hybridization conditions are exemplified by overnight incubation at 42° C. in a solution comprising: 10-20% formamide, 5×SSC (150 mM NaCl, 15 mM trisodium citrate), 50 mM sodium phosphate (pH 7.6), 5×Denhardt's solution, 10% dextran sulfate, and 20 ng/ml denatured, sheared salmon sperm DNA. In AOTI, a reference to a nucleotide sequence herein will be understood as implicitly providing disclosure of related sequences that would hybridize to the sequence under at least moderately stringent conditions.

[0306] In AOTI, a reference to a nucleotide sequence herein will be understood to implicitly encompass nucleotide sequences that hybridizes to the defined sequence under stringent hybridization conditions. Stringent hybridization conditions can be exemplified by 0.015M sodium chloride, 0.0015M sodium citrate at about 65-68° C. or 0.015M sodium chloride, 0.0015M sodium citrate, and 50% formamide at about 42° C.

### b. Structural Similarity of Domains and Polypeptides

[0307] In AOTI, variants of a referenced polypeptide or amino acid sequence can further be characterized on the basis of having a similar predicted/confirmed structure, in part or all of a biomolecule.

[0308] Aspects that are directed/limited to amino acid sequence or polypeptide variants that are structurally as well as compositionally similar (in terms of sequence identity, sequence similarity, or both), typically will have a higher rate of variants that function similarly, equivalently, or better than the reference sequence or polypeptide. As such, the implicit disclosure of amino acid sequences and polypeptides herein includes, In AOTI, variant sequences and polypeptides that also exhibit any one or more of such levels of structural similarity to the reference polypeptide or amino acid sequence. For example, the disclosure of an aspect of this invention relating to a HSV-1 gD sequence will be understood to implicitly disclose use of variants of such sequence that are related or similar in sequence composition and also structurally similar in one or more aspects across one or more parts of HSV-1 gD.

[0309] While variants will typically comprise a similar structure to a referenced sequence and homologs will likewise often share a similar structure, this may be in only part of a sequence or molecule. For instance, the plant Flu regulatory protein is present both in Arabidopsis (multicellular higher plant) and Chlamydomonas (single cell green algae), but the Chlamydomonas version (homolog) is more complex, crossing the membrane twice rather than once, containing additional domains, and undergoing alternative splicing, while still retaining the ability to fully substitute the much simpler Arabidopsis protein homolog if transferred by genetic engineering.

[0310] Structural determinations of polypeptides and amino acid sequences can be made by any suitable technique, including by empirical analysis, computer modeling based on sequence information, or both.

### 1) Experimental Methods for Analyzing Structure

[0311] Several empirical methods for determining protein structure are KITA and the results of such analyses can be used to evaluate the structural similarity of variants. Experimental methods for assessing structural similarity of polypeptides that can be applied to determine structural similarity of variants include nuclear magnetic resonance (NMR) techniques (including two dimensional and three dimensional NMR methods), microscopy techniques such as cryo-electron microscopy, Raman spectroscopy small angle x-ray scattering techniques, circular dichroism methods; Fourier Transform Infrared (FTIR) spectroscopy; or X-ray crystallography (e.g., scattering or diffraction methods).

[0312] Nuclear magnetic resonance (NMR) spectroscopic structure determination techniques are well-known in the art (SFE Wuthrich, NMR of Proteins and Nucleic Acids, Wiley, New York, 1986; Wuthrich, K. Science 243:45-50 (1989); Clore et al., Crit. Rev. Bioch. Molec. Biol. 24:479-564 (1989); Cooke et al. Bioassays 8:52-56 (1988)). In AOTI, the determination of similarity comprises a positive result in a two-dimensional NMR analysis. Additional principles and methods relating to the use of NMR for determination of protein structure, which can be employed to determine structural similarity of variants, are descried in, e.g., T. Kevin Hitchens et al. (2005). FUNDAMENTALS OF PROTEIN NMR SPECTROSCOPY (Focus on Structural Biology). Berlin: Springer. ISBN 978-1-4020-3499-2; Quincy Teng (2005). STRUCTURAL BIOLOGY: PRACTICAL NMR APPLICATIONS. Berlin: Springer. Bibcode:2005stbi.book.T. ISBN 978-0-387-24367-2; Mark Rance et al. (2007). PROTEIN NMR SPECTROSCOPY: PRINCIPLES AND PRACTICE (2nd ed.). Boston: Academic Press. ISBN 978-0-12-164491-8; Kurt Wuthrich (1986). NMR OF PROTEINS AND NUCLEIC ACIDS. New York: Wiley. ISBN 978-0-471-82893-8; Bax A. Annu Rev Biochem. 1989; 58:223-256. doi:10.1146/annurev.bi.58.070189.001255; Wuthrich K. Acta Crystallogr D Biol Crystallogr. 1995; 51(Pt 3):249-270. doi:10.1107/S0907444994010188; Oschkinat, H et al. Nature 332, 374-376 (1988). https://doi.org/10.1038/332374a0; Clore et al., Annu. Rev. Biophys. Biophys. Chern. 1991.20:29-63; Sugiki T et al. Comput Struct Biotechnol J. 2017; 15:328-339. doi:10.1016/j.csbj.2017.04.001; and Howard, M Current Biology I Volume 8, ISSUE 10, PR331-R333, May 7, 1998. Open Archive DOI:https://doi.org/10.1016/S0960-9822(98)70214-3. Methods for the preparation and labeling of proteins for NMR with 13C, 15N, and 2H for structural determinations are described in U.S. Pat. No. 6,376,253. NMR spectroscopy of large or complex proteins is described in U.S. Pat. No. 6,198,281. Use of nuclear magnetic resonance to design ligands to target biomolecules is described in U.S. Pat. No. 5,989,827. In AOTI, structural similarity of a FV is confirmed by comparison of NMR data.

[0313] X-ray crystallography methods are also KITA. SFE Shi Y. Cell. 2014; 159(5):995-1014. doi:10.1016/j.cell.2014.10.051 and Ilari A, Savino C. Methods Mol Biol. 2008; 452:63-87. doi:10.1007/978-1-60327-159-2_3. For a description of the crystallization conditions, methods for obtaining and interpreting the resultant crystal structures, and discussions on the biologically active regions of these proteins based on structural models, see, Griffith et al., Proc Natl Acad Sci USA. 1996 Jan. 23; 93(2):878-83 & Scheufler et al., J Mol Biol. 1999 Mar. 19; 287(1):103-15. In AOTI, structural similarity is determined by a method comprising the use of X-ray crystallography data. In AOTI, similarity is determined by serial femtosecond crystallography. In AOTI, structural similarity is determined by free electron X-ray laser (XFEL). Crystallization methods and analysis of crystalized molecules are described in at least U.S. Pat. Nos. 6,329,184 & 6,403,330. Methods for using x-ray topography and diffractometry to improve protein crystal growth are described in U.S. Pat. No. 6,468,346. Methods and apparatus for automatically selecting Bragg reflections, and systems for automatically determining crystallographic orientation are described by U.S. Pat. No. 6,198,796.

[0314] In AOTI, both NMR and crystallography methods are used to generate data of a reference polypeptide or sequence and a variant polypeptide or sequence to determine similarity. The combined use of NMR and X-Ray crystallography methods are known in the art. SFE Yee A A, Savchenko A, Ignachenko A, et al. NMR and X-ray crystallography, complementary tools in structural proteomics of small proteins. J Am Chem Soc. 2005; 127(47):16512-16517. doi:10.1021/ja053565+; Szymczyna B R, Taurog R E, Young M J, Snyder J C, Johnson J E, Williamson J R. Synergy of NMR, computation, and X-ray crystallography for structural biology. Structure. 2009; 17(4):499-507. doi:10.1016/j.str.2009.03.001; and Berg J M, Tymoczko J L, Stryer L. BIOCHEMISTRY. 5th edition. New York: W H Freeman; 2002. Section 4.5, Available from: https://www.ncbi.nlm.nih.gov/books/NBK22393/.

[0315] In aspects, structural similarity is established through a method that comprises electron microscopy analysis of compared biomolecules or sequences. Three dimensional electron microscopy, frequently referred to as 3DEM, can also be used to determine 3D structures of large macromolecular assemblies including PPTs. Commonly used methods involve imaging of many thousands of different single particles preserved in a thin layer of non-crystalline ice (cryo-EM). Cryo-EM methods for polypeptide analysis are described in, e.g., Fernandez-Leiro R, et al. Nature. 2016; 537(7620):339-346. doi:10.1038/nature19948. Combined use of cryo-EM & X-ray crystallography is described in, e.g., Venien-Bryan C et al. Acta Crystallogr F Struct Biol Commun. 2017; 73(Pt 4):174-183. doi:10.1107/S2053230X17003740 & Wang H W, Wang J W. Protein Sci. 2017; 26(1):32-39. doi:10.1002/pro.3022.

[0316] In aspects, the structural analysis of a referenced polypeptide or sequence, a variant polypeptide or sequence, or both, comprise the use of mass spectrometry data. Mass spectrometry (“MS”) methods have been successfully employed to determine protein structure. SFE Vandermarliere E, et al. Mass Spectrom Rev. 2016; 35(6):653-665. doi:10.1002/mas.21450. In AOTI, such a method comprises the use of chemical cross-linking mass spectrometry (CXMS), which can provide a low-resolution analysis that can be employed with small amounts of sample material as compared to NMR or X-Ray crystallography. The use of CXMS is described in, e.g., Sinz, A. (2003) Journal of Mass Spectrometry, 38 (12), (pp. 1225-1237); and Singh, P et al (2010) Analytical Chemistry, 82 (7), (pp. 2636-2642). Combined use of MS & X-Ray crystallography methods are described in Montenegro F A et al. Front Physiol. 2017; 8:892. doi:10.3389/fphys.2017.00892.

[0317] In aspects, structural similarity is established by application of Fourier-transform infrared (FTIR) spectroscopy, circular dichroism, or a CT. The use of such technologies to determine protein structure, especially secondary structures, is KITA. SFE Arrondo J L et al. Prog Biophys Mol Biol. 1993; 59(1):23-56; Arrondo J L, Goni F M. Prog Biophys Mol Biol. 1999; 72(4):367-405.R; Micsonai A et al. Proc Natl Acad Sci USA. 2015; 112(24):E3095-E3103. doi:10.1073/pnas.1500851112; and Greenfield, N. Nat Protoc 1, 2876-2890 (2006). https://doi.org/10.1038/nprot.2006.202

[0318] Each of these experimental methods has various strengths and limitations, KITA. For large polypeptides and domains crystallography typically is the method of choice for structure determination. For relatively smaller sequences, such as, e.g., EAT-2 variants (or other sequences of, e.g., about 100-130 amino acids in length), 2-D NMR can also be applied to structure determination. That said, a major advantage of NMR spectroscopy is that it provides information on proteins in solution, as opposed to those locked in a crystal or bound to a microscope grid, and thus, NMR spectroscopy is the premier method for studying the atomic structures of flexible proteins. A typical NMR structure will include an ensemble of protein structures, all of which are consistent with the observed list of experimental restraints.

[0319] The output of the various methods described above typically will be a mapping of the atomic positions of the atoms that make up the compared PPTs/AARSs. These atomic positions of the atoms for compared AARSs/PPTs can be compared using any suitable comparison standard and alignment/orientation of atoms, such as root-mean-square deviation of atomic positions (or simply root-mean-square deviation/RMSD). RMSD analytical methods adaptable to AOTI are described in, e.g., Armougom F, et al (2006). Bioinformatics. 22 (14): e35-39. doi:10.1093/bioinformatics/btl218. PMID 16873492; Damm K L et al (2006). Biophys J. 90 (12): 4558-4573. doi:10.1529/biophysj.105.066654. PMC 1471868. PMID 16565070; & Maiorov V N et al. (1994). J Mol Biol. 235 (2): 625-634. doi:10.1006/jmbi.1994.1017.

[0320] In AOTI, structural similarity of AARSs is determined by RMS deviation between corresponding superimposed portions of two determined structures for a variant and parent/referent. In aspects, the coordinates of at least 25. ≥30, ≥40, ≥50, ≥70, ≥80, ≥100, or ≥120 corresponding atoms, and in some cases ≥150, ≥200, or ≥250 corresponding atoms are used to calculate the RMS deviation between compared AARSs. In aspects, the coordinates of generally all, substantially all, or all corresponding atoms in AA backbones are used to calculate an RMS deviation. In certain embodiments, the coordinates of all corresponding alpha carbon-atoms in AA backbones are used to calculate an RMS deviation. In certain embodiments, the coordinates of all corresponding identical residues, including side chains, are used to calculate an RMS deviation.

[0321] In certain embodiments, the RMS deviation between the structures of two compared polypeptides or sequences is 3.5 Angstroms (A) or less, about 3 A or less, or about 2.5 A or less. In other aspects, the RMS deviation between two or more similar sequences that can define a subset of suitable variants implicitly provided by a disclosure of any referenced sequence or polypeptide herein is about 2 A or less, about 1.5 A or less, about 1 A or less, 0.75 A or less, 0.5 A or less, 0.3 A or less, 0.2 A or less, or 0.1 A or less.

[0322] In AOTI, the structures in the compared ensemble will be very similar to each other in regions with strong restraints. Presumably, areas with fewer restraints are the flexible parts of the molecule, and thus do not give a strong signal in terms of structural similarity. As such, In AOTI, the determination of similarity focuses on those areas that would be considered to be not flexible regions using assessments known in the art.

[0323] When a number of structural templates of comparable similarity are available a tool such as MODELLER or a similar comparative modeling program capable of automatically combining a number of template structures can be used to better represent the analysis of structures. Candidate conformations for these regions also can be produced by searching a database of homologous structures for the fragments of identical length that also satisfy the steric constraints for these regions. Both sequence similarity and structural context near the region can be considered in selecting the actual conformation. Side chains within the model can be positioned using a backbone-dependent rotamer library (Bower et al. (1997) J. Mol. Biol. 267: 1268-1282).

[0324] Assessment of structural models can be performed techniques KITA. One of these, ProsaII (Sippl (1993) Proteins, 17: 355-362, Aloy et al. (2000) J Comput Aided Mol Des. 14: 83-92), which is used to detect errors in protein structures, creates an energy profile along the sequence of PPTs. Regions that are assigned high energy values by ProsaII serve as good indicators of errors in representing structure of such regions. For detailed checks of modeled structures, the structure verification module of the WHATIF program (Vriend (1990) J. Mol. Graph 8: 52-56) can be used along with visual inspection. If these assessments of model quality identify problems in the modeled structure, appropriate steps (e.g., loop assignment or side chain positioning) can be repeated iteratively until an acceptable quality 3-dimensional model is obtained.

[0325] Using these and similarly known methods a computer model of the molecular structure of a referenced polypeptide or domain can be compared with the structure with other biomolecules or sequences. Typically such an analysis is performed by or comprises performing one or more computer modeling methods (e.g., by use of programs such as MACROMODEL™, INSIGHT™, and DISCOVER™, to obtain spatial and orientation requirements for the biomolecules or sequences that are the subject of comparison).

[0326] Commercially available or open source software also or alternatively might be used to perform RMS deviation calculations, structural superimpositions, or both. Useful examples include but are not limited to Pymol (Delano Scientific LLC), InsightII and Quanta (both from Accelrys), MIDAS (University of California, San Francisco), SwissPDB viewer (Swiss Institute of Bioinformatics), TOPOFIT (Northeastern University), CBSU LOOPP (Cornell University), and SuperPose (University of Alberta, Edmonton).

[0327] In aspects, a PDB model is generated for each of the sequences to be compared and such a PDB model is used to generate a TM-score using the TM score tool available at https://zhanglab.ccmb.med.umich.edu/TM-score/. One group of variants within the implicit disclosure of any reference provided herein exhibits a TM score of at least 0.5, e.g., ≥0.6, ≥0.7, ≥0.8, or ≥0.9.

[0328] In aspects, structural similarity is determined using RMSD analysis along with Global Distance Test (GDT) or Longest Continuous Segment (LCS) analysis methods, wherein multiple superimpositions are generated for each tested structure. Such methods are described in Kufareva I, Abagyan R. Methods Mol Biol. 2012; 857:231-257. doi:10.1007/978-1-61779-588-6_10

### 2) Computational Sequence Structure Analysis

[0329] Experimental techniques, such as X-Ray crystallography and NMR can be costly, slow, and unusable for acquisition of the structure of some PPTs. As such, In AOTI, assessment of structural similarity AOA is performed by methods comprising or CO computational sequence-based structure prediction.

[0330] Aspects of computational sequence-based structure prediction overlap with methods of assessing sequence similarity, e.g., WRT hydrophobicity, charge, residue size/bulk, flexibility, etc. Indexing amino acid sequences on such a basis allows sequences to be characterized and compared to each other and known clusters of similar sequences (SFE Biro J C. Amino acid size, charge, hydropathy indices and matrices for protein structure analysis. Theor Biol Med Model. 2006; 3:15. doi:10.1186/1742-4682-3-15).

[0331] Several tools provide for analysis of sequences on such a basis. For example, the ProtParam program (https://web.expasy.org/protparam/) is a web accessible tool which allows the computation of various physical and chemical parameters for a given protein, including molecular weight, theoretical pI, amino acid composition, atomic composition, extinction coefficient, estimated half-life, instability index, aliphatic index and grand average of hydropathicity (GRAVY). In AOTI, a variant will have an instability index score that indicates the variant is a stable sequence when analyzed using this tool (default settings). In AOTI, FVs AOA will have an estimated eukaryotic half-life of at least 10, at least 20, or at least 30 hours. Methods for assessing similarity of peptides in terms of hydropathic properties, weight conservation, and similar considerations are further described in e.g., International Patent Applications WO 03/048185, WO 03/070747, and WO 03/027246.

[0332] Other tools provide for the analyses of secondary structure and can be used to define structurally similar variants. For example, In AOTI, variants will comprise most, generally all, substantially all, or all of the secondary structures identified using a secondary structural analysis tool, such as the PROMALS3D sequence and alignment server, which is available at http://prodata.swmed.edu/promals3d/promals3d.php. In AOTI, the length of such secondary structures varies on average by less than about 33%, less than about 25%, less than about 20%, less than about 15%, or less than about 10% between the secondary structures of the two sequences. Elements of secondary structure also or alternatively can be confirmed by comparison with the results obtained with other additional 2-D structure servers: SSpro8 (Scratch Protein Predictor, scratch.proteomics.ics.uci.edu), NetSurfP ver. 1.1 (at cbs.dtu.dk) and PSIPRED (at bioinf.cs.ucl.ac.uk/psipred).

[0333] Structure similarity can be determined using the PROCHECK program (described in, e.g., Laskowski, J. Appl. Cryst., 26, 283-291 (1993)), the MODELLER program, or commercially available programs incorporating such features. Structure predictions can be compared by way of a sequence comparison using a program such as the PredictProtein server (available at http://dodo.cpmc.columbia.edu/predictprotein/). Additional techniques for analyzing protein structure that can be applied to determine structural similarity are described in, e.g., Yang and Honig, J. Mol. Biol., 301(3), 665-78 (2000), Aronson et al., Protein Sci., 3(10), 1706-11 (1994), Marti-Remon et al., Annu. Rev. Biophys. Biomol. Struct., 29, 291-325 (2000), Halaby et al., Protein Eng., 12(7), 563-71 (1999), Basham, Science, 283, 1132 (1999), Johnston et al., Crit. Rev. Biochem. Mol. Biol., 29(1), 1-68 (1994), Moult, Curr. Opin. Biotechnol., 10(6), 583-6 (1999), Benner et al., Science, 274, 1448-49 (1996), and Benner et al., Science, 273, 426-8 (1996), as well as WO 00/45334.

[0334] Structural analysis also can be performed by comparison against one or more domain databases which are available in the art. Exemplary database or collections of protein structural elements include but are not limited to the Structural Classification of Proteins (SCOP, maintained by and available through Cambridge University); the database of protein families (Pfam, maintained by and available through the Welcome Trust Sanger Institute); the Universal Protein Resource (UniProt, maintained by and available through the UniProt Consortium); the Integrated resource for protein families (InterPro; maintained by and available through EMBL-EBI); the Class Architecture Topology Homologous superfamily (CATH, maintained by and available through Institute of Structural and Molecular Biology at the University College London); and the families of structurally similar proteins (FSSP, maintained by and available through EBI). Any algorithm deemed suitable by one of skill in the art may be used to select the linker, including but not limited by those used by SCOP, CATH and FSSP. Useful examples of tools/algorithms used for such assessments include Pymol (Delano Scientific LLC), InsightII & Quanta (both from Accelrys), MIDAS (University of California, San Francisco), SwissPDB viewer (Swiss Institute of Bioinformatics), TOPOFIT (Northeastern University), CBSU LOOPP (Cornell University), & SuperPose (University of Alberta).

[0335] In AOTI, variants are defined as structurally similar on the basis of exhibiting similar domains with a sufficiently strong score (e.g., an e-value) based on a domain analysis tool. Examples of available domain analysis tools include, e.g., Prosite (prosite.expasy.org/scanprosite), SMART (smart.embl-heidelberg.de), NCBI's Conserved Domain Database (Conserved Domain Architecture Retrieval Tool), INTERPRO (ebi.ac.uk/interpro), ProDom (prodom.prabi.fr/prodom/current/html/home.php), CATH v3.4 on the world wide web at cathdb.info), Superfamily (supfam.cs.bris.ac.uk/SUPERFAMILY), PIRSF (pir.georgetown.edu), and functional searched by PANTHER on the world wide web at .pantherdb.org. The ExPASy bioinformatics portal provides a listing of numerous tools for the evaluation of structure, including various ways to employ PROSITE analysis of sequences (e.g., the PPSearch tool) (see https://www.expasy.org/proteomics/families_patterns_and_profiles).

[0336] Computer-aided structural similarity analysis of sequences may be established using hidden Markov model (HMM) databases, e.g., InterPro, SMART etc. or position-specific scoring matrix (PSSM)-based databases e.g., NCBI's conserved domain database (CDD). Another tool for structure comparison is the software STRUCTAL, which uses a different similarity measurement than RMSD. See, A. C. M. May. Protein Engineering, 12:707-712, 1999 for a review 37 different protein structure similarity measures ATAOTI.

[0337] Amino acid sequences that define a class of suitably structurally similar polypeptides or sequences can be compared by their overall structure, i.e. classifying proteins into a hierarchy to determine similarities. Traditionally, these classifications are done manually with the aid of some automated tools and consider information that biologists have on the function and origin of PPTs. An example of this is the Structural Classification of Proteins (SCOP) database. Another examples is the CATH protein hierarchy, which separates PPTs at level 1 by “class” (i.e. whether the protein contains only alpha helices or beta strands or both), at level 2 by “architecture” (the gross orientation of secondary structures, currently done manually), at level 3 by “topology” (the connections between and numbers of secondary structures), and at the lowest level by “homologous superfamilies” (which takes into account structural & functional similarities between PPTs). Another modeling approach used to define groups of structurally similar sequences is described in Venclovas et al. (1999) Proteins-Structure Function and Genetics, 73-80).

[0338] Domain pattern databases that can be used to analyze one or more sequences are available in the art. Examples of such tools include PROSITE, Pfam, SMART, InterPro, PRINTS, and the like. The SWISS-MODEL tool also provides the ability to perform structural homology searching (https://swissmodel.expasy.org/). Other similar tools are available, at, e.g., https://www.ebi.ac.uk/Tools/pfa/ and several other sites available on the web to those knowledgeable of the art and include the RaptorX tool, http://raptorx.uchicago.edu/StructPredV2/predict/, the 3D-modeling of the proteins using PHYRE2 Protein Fold Recognition Server, and the TM-Score tool available at https://zhanglab.ccmb.med.umich.edu/TM-score/. The identification of similar domains by use of any of these tools with significant scores reflecting a high likelihood of the presence of such a domain can also or alternatively be used to define structurally similar variants. Thus, In AOTI, the variants implicitly or explicitly provided herein will exhibit at least one, at least two, or at least three domains, or will exhibit at least 33%, at least 50%, at least 75%, or all of the domains identified for a reference sequence performing an analysis in the same one of these tools. Examples of such analyses are provided further below (e.g., with respect to gD sequence variants).

[0339] Predicted structural similarity in a test sequence, such as a variant amino acid sequence, in one aspect means exhibiting one or more of the same domains as a reference amino acid sequence analyzed by the same tool. Typically the determination of domains will be determined by (a) InterPro Scan (http://www.ebi.ac.uk/interpro/search/sequence/) or PFAM (https://pfam.xfam.org/) and also or alternatively (b) NCBI's CDD search tool (https://www.ncbi.nlm.nih.gov/Structure/cdd/wrpsb.cgi?), or (c) by both positive hits with (a) and (b), wherein the association of both sequences and the one or more domains is associated with an E-value that indicates that the relationship is significant, thereby reflecting the likely presence of the domain. An E-value>10e−100 will typically indicate near certainty of the relationship; 10e−30<E-value<10e−100 indicates the relationship is highly likely; 10e−10<E-value<10e−30 indicates that the relationship is very likely; and at 10e−6<E-value<10e−10 the relationship can be considered likely. For example, HSV-1 gD is identified by Interpro Scan and PFAM submission as possessing a domain according to PFAM family PF01537 (“Herpesvirus glycoprotein D/GG/GX domain”) with an E-value of 8e−39 (highly likely) and CDD analysis similarly identified the likely presence of the domain with an E-Value of 4.34e−22 (very likely), whereas HSV-2 gD is associated with this domain with an Interpro Scan/PFAM E-score of 1.2e−37 (highly likely) and a CDD E-value of 5.88e−44 (highly likely). Analysis with these tools can also or alternatively employ bit scores to assess relationship. A bit score of 175 or higher also or alternatively can indicate that the identified/expected domain in a variant also or alternatively maps to the domain or domain family with near certainty, a bit score of 125-175 also or alternatively can indicate the relationship between the program-identified domain and the domain family is at least very likely (e.g., HSV-1 gD exhibits a bit score of 132.6 and HSV-2 gD exhibits a bit score of 128.8 to PFAM family PF01537 according to PFAM analysis), and a bit score of 75-125 can at least indicate that two sequences is likely.

[0340] Similar types of analyses with tools can also or alternatively provide a computational indication of structural similarity in one or more domains. For example, raw scores in PROSITE profiles are converted into so-called ‘log 10 per residue E-values’, which can be indicative of the likelihood of a relationship arising by chance. A normalized PROSITE score of 9.0 or higher, for example, is expected to occur about once in a database of one billion residues. The Motif Scan tool (https://myhits.isb-sib.ch/cgi-bin/motif_scan) provides automatic results as well as scores, including an automatic “strong match” indication and “strong match for family-specific motif” indication that can be used to determine if two or more sequences comprise similar motifs/domains.

### vii. Suitability—Activity of Variants, Homologs, and Fragments

[0341] FVs typically retain at least a suitable (or comparable or improved) degree of one or more functional activities exhibited by the referenced sequence or biomolecule. For example, with respect to gD sequences such a function might be the ability to bind HVEM, Nectin-1, or another gD receptor (e.g., Nectin-2) in the case of a gD sequence. With respect to Ag(s) or ITII(s) such a function might be the ability to stimulate an immune response in a host. In the case of an expression-enhancing intron the retained ability will be the ability to detectably enhance expression of the associated coding sequence(s). In the case of a promoter, the function will be the ability to enhance expression of an operatively linked coding sequence.

[0342] Given that the functions of the various polypeptide, nucleic acids, and sequences thereof that define the various aspects of the invention vary significantly the tests for the retention or improvement of such functions will also vary accordingly. The function of a polypeptide encoded by a construct, for example, will be specific to the polypeptide and clear from the disclosure provided herein, the art, or both. For example, polypeptides encoded by constructs of the invention can be antigenic and immunogenic polypeptides, which can be used to, e.g., prevent or treat, i.e., cure, ameliorate, lessen the severity of, or prevent a disease regulated by the immune system, such as a pathogenic disease, cancer, or other disorder.

[0343] As noted above, variants provided by implicit or explicit disclosure herein can be classified as “functional variants,” retaining/possessing suitable biological activity, similar biological activity, or improved biological activity in one or more suitable respects to a WTC. Thus, except where clearly contradicted each referenced sequence or polypeptide herein implicitly provides support for variants that are, e.g., RVRHROSI, SVSHSOCE, or both, and that exhibit one or more biological activities of a referenced wild-type counterpart at a suitable, similar, or improved level.

[0344] A “suitable” level of activity in such contexts means at least about 33% of one or more referenced activities is exhibited by the variant (or “is retained” by the variant) if the function is associated with a measurable property. A “similar” or “equivalent” level of activity typically means at least about 75% of the referenced activity (and typically at least about 85%, at least about 90%, or 95-100% of the referenced activity). An “improved” level of activity can be any detectable level of improvement of activity with respect to the function-in-question as compared to the reference sequence, such as a wild-type counterpart of a variant (e.g., about 105% of the typical activity of the referenced biomolecule or sequence). In AOTI, variants are provided that have a significant level of improved activity (a statistically significant improvement). In aspects, variants are provided that have a clinically significant level of improvement (a statistically significant improvement in CEs associated with the variant as compared to the reference AARS/PPT).

[0345] Primary functions of the polypeptides, nucleic acid molecules, and sequences that form common elements of the aspects of this invention are provided herein and will be clear in the art. Antigenic sequences, for example, are associated with the primary function of promoting, inducing, or enhancing an antigen response in a subject. ITII sequences exhibit the ability to immunomodulate the activity of one or more innate trained immune cells. Expression-enhancing intron sequences are associated with enhancement of associated coding sequences. PTPS sequences are associated with detectably enhanced levels of proteasomal processing. Some elements can be associated with two or more functions in some cases. For example, a gD sequence or polypeptide can be associated with binding to one, two, or more receptors; with checkpoint inhibition functions; with uptake of associated antigens by target cells; and the like. Such functions can also be defined as higher level functions such as the ability to treat a disease or condition or to induce a protective immune response against a disease-causing agent. Various exemplary tests for such functions (e.g., induction of an immune response, treatment of disease, and the like) are described elsewhere in this description and additional examples of such tests will be known to those of skill in the art.

[0346] As is the case with variants, the similarity in function of homologs does not have to be identical, but, rather, only suitably similar. For example, the four known classes of hemoglobins (hemoglobin A, hemoglobin A2, hemoglobin B, and hemoglobin F) are paralogs of each other; but while each of these proteins serves the same basic function of oxygen transport, they have already diverged slightly in function in that fetal hemoglobin (hemoglobin F) has a higher affinity for oxygen than adult hemoglobin. Thus, In AOTI, a suitable FV means a variant that exhibits/retains at least about 35%, at least about 50%, at least about 65%, at least about 75%, at least about 80%, at least about 85%, at least about 90%, or at least about 95% of one or more biological functions of a referenced WTC.

[0347] The biological activity of FVs can also be higher than that of the referenced protein, even where the referenced protein is a naturally occurring protein. Indeed, obtaining higher levels of activity is a motivator for generating variants. It also may be the case where, unless otherwise indicated by the description, that a variant, homolog, chimera and the like may exhibit functions that are not exhibited by the referenced polypeptide, nucleic acid, or sequence.

[0348] It also can be the case that OSMGA, but not all, of the functions of a referenced WTC are exhibited/retained in a variant, substitute homolog, chimera, or the like. For example, a gD homolog might exhibit nectin-1 binding, but not HVEM binding, despite the presence of both functions in the referenced sequence. Where specific functions are required for a class of biomolecules or sequences according to the explicit description provided herein, however, suitable variants also will exhibit such functions at a suitable similar, or improved level, or the level specified by the disclosure, if applicable.

[0349] In AOTI, the duration of the retained/exhibited function also can be classified as either suitable, similar, or improved with respect to a referenced naturally occurring protein counterpart. A variant might exhibit, for example, greater stability than a naturally occurring counterpart, resulting in an improvement in duration of a function.

[0350] In AOTI, variant sequences are further characterized in not resulting in a detectable, significant, or clinically significant increase in an aspect of toxicity, mutagenicity, genotoxicity, carcinogenicity, teratogenicity, deleterious cross-reactivity, or significant clinical adverse events in subjects of a species or other defined population when the construct encoding the variant sequence(s) is administered in an intended/effective amount under planned administration conditions (dosages, dosage amount, etc.). Methods for the evaluation of such characteristics are well known in the art (SFE the World Health Organization's Guidelines on the quality, safety, and efficacy of biotherapeutic protein products prepared by recombinant DNA technology, https://www.who.int/biologicals/biotherapeutics/rDNA_DB_final_19_Nov_2013. pdf?ua=1 and US FDA's Guidance for Industry Preclinical Safety Evaluation of Biotechnology-Derived Pharmaceuticals (and 2011 Addendum)). Such characteristics can also or alternatively be applied to any of the expression products of constructs described herein, to the constructs themselves, and to compositions comprising such constructs (e.g., formulations for delivering expression vectors encoding gDAgFP(s) and optionally other polypeptides).

### 4. Encoded Amino Acid Sequences and Polypeptides

[0351] Constructs can encode a number of AARSs or PPTs or both as well as gDP(s) and Ag(s). Such PPT(s)/AARS(s) are discussed here.

### i. Reporter (Marker) and Selection (Resistance) Sequences

[0352] In AOTI, constructs include NSs encoding a reporter sequence/polypeptide, a selection sequence/polypeptide, or both. In AOTI, a reporter sequence/polypeptide, a selection sequence/polypeptide, or both, are expressed from the same NAM as another CS, e.g., a gdAgFPES. In AOTI, a selection sequence/reporter sequence is expressed as part of a fusion protein with other sequences. In aspects, a selection sequence/polypeptide, reporter sequence/polypeptide, or a combination thereof, is expressed from a nucleic acid that is different from the nucleic acid comprising the gD polypeptide-encoding sequence (e.g., the gD:antigen fusion protein-encoding sequence) or is different from any nucleic acid comprising any other encoding sequences, but included in the same composition that is used to transfect target cells.

[0353] A “reporter sequence/polypeptide” means any suitable sequence or polypeptide that facilitates detection of the expression product. The use of such sequences/polypeptides are KITA. In some cases, reporter polypeptides are referred to by other names, such as “reporter genes.” Such sequences and polypeptides are also sometimes described in the art as “detectable markers,” and include a number of readily detectable expression products, such as fluorescent markers or cell surface proteins that can be detected by methods such as flow cytometry. In general, a reporter gene can be any gene that is not present in or expressed by the recipient organism or tissue and that encodes a polypeptide whose expression is manifested by some easily detectable property, e.g., enzymatic activity. Examples of suitable reporter genes may include genes encoding luciferase, beta-galactosidase, chloramphenicol acetyl transferase, secreted alkaline phosphatase, or the green fluorescent protein (GFP) gene (SFE Ui-Tei et al., 2000 FEBS Letters 479: 79-82). Additional reporter genes include glutathione-5-transferase (GST), horseradish peroxidase (HRP), chloramphenicol acetyltransferase (CAT), beta-glucuronidase, luciferase, HcRed, DsRed, cyan fluorescent protein (CFP), yellow fluorescent protein (YFP), and autofluorescent proteins including blue fluorescent protein (BFP). Other common methods include inclusion of reactive sequences such as biotin or avidin or an enzyme/enzyme substrate/reactive group, or chromophore or luminescent compound, such as a bioluminescent, phosphorescent or chemiluminescent compound, and fluorescent compound. Still additional examples include an extracellular domain of human CD2, or a truncated human EGFR (huEGFRt; see Wang et al., Blood 118:1255, 2011).

[0354] In some cases, NAMs/NSs can be labeled, e.g., with detectable nucleotides, such as radionucleotides, or non-radioactive detectable nucleotides or other type of ligand including other molecules or proteins such as, e.g., chemically reactive groups like biotin, streptavidin, or fluorophores. Pre-labeled oligos are available from most oligo suppliers like as IDT DNA or Genewiz and labeling kits are available from ThermoFisher, among others. Inclusion of NSs for rapid hybridization also can act as a marker/label for a nucleic acid.

[0355] A “selection sequence/polypeptide” is a sequence that allows the growth of cells transfected with a construct comprising the sequence to selectively grow. Such sequences and polypeptides are well known in the art. Selection sequences/polypeptides are often described in the art as “selection markers.” A selection marker can be any coding sequence that allows for selective retention of cells comprising a nucleic acid of interest, e.g. a plasmid, during culturing and propagation in the host cells.

[0356] Examples of selectable markers include those genes useful in antibiotic resistance systems, e.g. ampicillin, kanamycin, and neomycin (e.g., a neomycin phosphotransferase marker). Types of selectable markers include those genes useful in antibiotic resistance systems, e.g. amp, kana, neo; in which an operator sequences, e.g. the lac operator or tet operator, placed on a multicopy plasmid, derepresses a chromosomal gene; antidote/poison selection schemes, in which an antidote (e.g. the ccdA gene) to a poison expressed from the host chromosome (e.g. the ccdB gene) is maintained on the plasmid; and those useful in RNA-based selection schemes, e.g. RNAI and RNAII antisense regulators, or antisense regulators that inhibit the translation of a gene that would otherwise promote cell death. Selection markers can include genes to provide a genetic marker for selection and/or evaluation of the cells, such as to assess in vivo survival or localization; genes to improve safety, for example, by making the cell susceptible to negative selection in vivo as described by Lupton S. D. et al., Mol. and Cell Biol., 11:6 (1991); and Riddell et al., Human Gene Therapy 3:319-338 (1992); see also PCT/US91/08442 and PCT/US94/05601 describing the use of bifunctional selectable fusion genes derived from fusing a dominant positive selectable marker with a negative selectable marker. See also, e.g., Riddell et al., U.S. Pat. No. 6,040,177, at columns 14-17.

[0357] Constructs caninclude one or more nonantibiotic resistance markers. In a particular case, such constructs lack any antibiotic resistance markers. In practical terms, such features can be important in, e.g., constructs for administration to NHAs, particularly livestock subjects, where the use of antibiotics is strictly regulated, discouraged, or prohibited. Examples of such selection systems, such as toxin/antitoxin systems, are KITA. SFE Mignon C, et al. Pathogens. 2015; 4(2):157-181. doi:10.3390/pathogens4020157

[0358] In AOTI, the constructs comprise a sequence encoding a selection sequence that allows selection by growth in the presence of the non-antibiotic biocide, triclosan (CAS Registry No.: 3380-34-5). Triclosan, a polychlorophenoxy phenol, is formulated in many consumer and industrial products including toothpastes, mouthwashes, soaps, shampoos, deodorants fabric softeners, facial tissues, antiseptics for wound care, and medical devices.

[0359] Selection for host cells carrying plasmids can be based on host tolerance to this biocide induced by overexpression of the bacterial gene fabl gene (encoding Enoyl-[acyl-carrier-protein] reductase [NADH]) incorporated into the plasmid. Goh S, Good L. Plasmid selection in E. coli using an endogenous essential gene marker. BMC Biotechnol. 2008; 8:61. doi:10.1186/1472-6750-8-61. Vibrio cholera FabV, a functional homologue of E. coli FabI, also can be used as a suitable marker for selection and maintenance of both high and medium-copy number plasmid vectors in E. coli in a triclosan selection system. SFE Ali S A et al. PLoS One. 2015; 10(6):e0129547. doi:10.1371/journal.pone.0129547. CEPESCs can comprise NSs encoding gDAgFP(s) and comprising a triclosan selection marker gene, such as FabI or FabV. In more specific aspects, such a composition comprises nucleotide sequences that comprise EEI(s), a PTPS associated with the fusion protein, an ITICSTAP-encoding sequence, such as an EAT-2 sequence/polypeptide, or a combination of any or all thereof.

### ii. Fusion Protein Encoding Sequences (FPESs) and FPSs

[0360] In many aspects, CEPs comprise FPs, such as gDAgFPs. In AOTI CEPs can comprise 1, 2, 3, or ≥4 gDPs/gDSs and 1, 2, 3, 4, 5, 6, 8, 10 or more Ag sequences. In aspects, SMGAOA of such gDS(s) and Ag(s) are contained in gDAgFP(s). Other FPs AOA are included in certain AOTI, such as in compositions or methods in which a targeting domain is incorporated into a second fusion protein-coding sequence, such as a innate trained immunity cell targeting sequence, such as a dendritic cell targeting sequence, such as a DEC-205 binding sequence, e.g., a DEC-205-binding trap protein, DFEH.

[0361] In general, a “fusion protein” refers to any polypeptide that, in at least one single chain, has at least two distinct, typically heterologous sequences (which are sometimes variously described herein and in the art as parts, portions, sections, ends, partners, or domains of the fusion protein), wherein the domains are not naturally found together in a protein. Typically, the different portions of the fusion protein each have at least one distinct function. For example, in the case of a gD:antigen fusion protein, the gD portion(s) of the fusion protein impart receptor targeting functions and the antigen sequences induce certain immune responses. The term “domain” is sometimes used in connection with fusion protein to refer to such portions, but the use of the term domain in such contexts is not meant to imply or require the presence of a secondary, tertiary, or quaternary structure.

[0362] A nucleic acid molecule encoding a fusion protein may be constructed using polymerase chain reaction (PCR) methods, recombinantly engineered, or the like, or prepared through nucleotide design and synthesis.

[0363] In certain embodiments, a fusion protein expressed or produced by a host cell (e.g., a DC or a T cell) locates to the cell surface, where the fusion protein is anchored to the cell membrane with a portion of the fusion protein located extracellularly (e.g., containing a binding domain) and a portion of the fusion protein located intracellularly (e.g., containing a signaling domain). A fusion protein can be engineered to include an EL of a PPT or only a FF of a PPT. The joining of the two or more genes expressing a FP may be made in any order, though in certain cases the placement of certain domains is preferably in a specific order, as will be indicated in the description of certain AOTI.

[0364] In addition to the specific FP component sequences described herein, additional heterologous AARSs can be included in FPs without impairing the functions of the other domains. For example, a technician or researcher may add to the nucleotide sequence a sequence that encodes a “tag” or “handle,” which can be used to facilitate isolation of a fusion protein (e.g., a FLAG peptide, SFE Einhauer A et al. J Biochem Biophys Methods. 2001; 49(1-3):455-465. doi:10.1016/s0165-022x(01)00213-5) (see also Terpe K. Appl Microbiol Biotechnol. 2003; 60(5):523-533. doi:10.1007/s00253-002-1158-6). Reporter sequences, as described above, are another example of a sequence that is regularly added to FPs to enable location of the FP in a cell or tissue.

### iii. Linkers

[0365] AARSs that form part of a FP can be linked directly or indirectly. An “indirect link” means the 2+ referenced AARSs are joined through an intervening amino acid residue or an amino acid sequence. Such an intervening residue or sequence is typically in the art and herein referred to as a “linker” or a “spacer” (or “tether”). Terms such as “linked” and “fused” are used interchangeably here to refer to the joining of any 2 sequences/parts.

[0366] The primary purpose of a linker typically is to create space between the two referenced AARSs that the linker links so as to ensure that the referenced parts/domains of the fusion protein can exhibit their intended functions. In AOTIs, linkers may be sufficiently large, sufficiently flexible, or both to allow the linked reference sequences to function more effectively than compared to corresponding no linker or smaller linker FPs. A linker typically primarily comprises or generally consists of uncharged amino acid residues. A linker typically does not significantly negatively impact the functioning of any AARSs it fuses. In other aspects, the linker also or alternatively reduces the immunogenicity associated with the fusion of the two referenced sequences.

[0367] A fusion protein, such as a gD:antigen fusion protein of the invention can comprise any suitable number of linkers between the various the referenced amino acid sequences of the fusion protein. Thus, for example, a gD:antigen fusion protein can comprise one, two, three, or more gD sequences, one, two, three, four, five, six, seven, eight, nine or more antigenic sequences, and possibly other sequences, such as one or more PTPSs, ERTPSs, or a combination thereof, wherein the fusion protein comprises two, three, four, five, six, seven, eight, nine, 10, 11, 12, 13, 14, or 15 linkers.

[0368] A linker typically will primarily comprise, GCO, consist essentially of, or consist of a sequence of two or more neutral polar or nonpolar amino acids. Linkers can be any suitable length. A linker can be, for example, 2 to about 100 amino acids in length, such as between 2-, 3-, and 4- and about 20-, 35- or −50 AAs in length, e.g., 3, 5, 10, 15, 20, 25, 30, 35, 40, 45, or 50 AAs in length (e.g., 2-28, 2-22, 2-18, 2-14, 2-12, 2-10, 2-8, 3-12, 3-15, 3-18, 3-21, 3-9, 4-8, 4-6, 4-12, 4-16, 4-20, 5-20, 5-15, 5-20, or 5-25 AAs in length). An exemplary, non-limiting linker is an AARS comprising at least 2 residues, ≥3 residues, ≥4 residues or ≥5 AAs and is flexible, hydrophilic, and has little or no detectable secondary structure of its own. When multiple linkers are used to interconnect portion of the molecule, the linkers may be the same or different (e.g., the same or different length and/or amino acid sequence).

[0369] In AOTI, a linker can be “cleavable,” for example, by auto-cleavage, or enzymatic or chemical cleavage. Cleavable linkers typically contain at least one bond that can be selectively cleaved by a cleavage reagent. Such linkers may be engineered, e.g., to contain protease cleavage sites, so that cleavage occurs in the middle of the linker or in at least one end of the linker. For example, thrombin sites may be engineered at each of the two flanking ends of a linker. Depending on the type of linker used, cleavage may also be mediated by agents such as TCEP, TFA, and DTT. Linkers may be designed so that cleavage reagents remove all residues from the linker from the cleavage product. Other exemplary non-limiting linkers include prodrug linkers whose bonds can be selectively cleaved under in vivo conditions, for example, in the presence of endogenous enzymes or other endogenous factors, or simply in aqueous fluids present in the body or in cells of the body. Cleavage sites in amino acid sequences and enzymes and chemicals that cleave at such sites are well known in the art and are also described further elsewhere herein.

[0370] In aspects, OSMGAOA of the linkers of a fusion protein do not contain cleavage sites. Such aspects may be useful in cases where it is desired that the fusion protein construct will remain fused longer.

[0371] Linkers occur naturally in some fusion proteins, such as antibodies, and any such naturally occurring linkers can be incorporated, where suitable, into a fusion protein of the invention. Naturally occurring linkers typically form a detectable coiled structure and comprise, and typically comprise, are at least 25% composed of, are at least 33% composed of, are at least 50% composed of, or are at least 75% composed of one or more of Gln, Arg, Glu, Ser, and Pro amino acid residues. One, some, most, generally all, or all of the linkers also can be artificial linkers, examples of which are provided herein.

[0372] “Flexible” linkers, which are typically composed of combinations of glycine and/or serine residues, can be advantageous in some aspects. Examples of such linkers are described in, e.g., McCafferty et al., Nature, 348, 552-554 (1990), Huston et al., Proc. Natl. Acad. Sci. USA, 85, 5879-5883 (1988), Glockshuber et al., Biochemistry, 29, 1362-1367 (1990), and Cheadle et al., Molecular Immunol, 29, 21-30 (1992), Huston et al., Proc. Natl. Acad. Sci. USA, 85, 5879-5883 (1988), Bird et al., Science, 242, 423-26 (1988), and U.S. Pat. Nos. 5,672,683, 6,165,476, and 6,132,992.

[0373] Exemplary linkers, especially flexible linkers, may comprise one or more glycine residues, one or more serine residues, or a combination thereof (e.g., one or more units of (Gly-Ser)n residues, where n is a number between 1 and 10, such as 1-5). Exemplary linkers also can comprise from about one to about ten repeats of a sequence according to the formula GlyₓSer_{y}, wherein x and y are each independently an integer from 1 to 5. In certain embodiments, the linker can comprise more glycine residues than serine residues, e.g., by comprising a (GxS)y sequence, wherein x and y are integers, wherein x=1, 2, 3 or 4, and wherein y=1, 2, 3, 4, 5, 6, or 7. In another exemplary aspect, a fusion protein expressed by a construct comprises a linker sequence that comprises a (G-G-G-G-S)x, amino acid sequence where x is a positive integer. In another aspect the fusion protein comprises one or more linkers according to (GGGGS)n (SEQ ID NO:459), where n is 1, 2, 3, 4, 5, 6, 7, or 8. In AOTI, the fusion protein of the invention comprises one or more linkers comprising one or more Gly residues. In aspects, FP(s) comprises one, two, three or more Gly-rich linkers (at least primarily comprises of Gly residues) or the linkers of the fusion protein primarily comprise, generally consist of, or consist of Gly-rich linkers. In AOTI, 1, ≥2, primarily all, generally all, or all linkers of a FP encoded by a construct are at least 60% Gly in composition. In AOTI, one, two, primarily all, generally all, or all of the linkers of a fusion protein comprise at least 33% Gly residues. Gly residues have a low preference to form an a-helix; thus, the lack of a sidechain maximizes the freedom of the backbone. Accordingly, In AOTI, the invention provides FPs comprising one or more Gly-containing or Gly-rich linkers that exhibit greater rotational freedom of the linked domains, lack of an alpha helix in or around the linker, or both.

[0374] In aspects, FP(s) comprise linkers comprising Ser residue(s), Thr residue(s), or a combination thereof. Ser and Thr are polar residues that typically prefer to interact with the solvent rather than with the fused domains. Accordingly, the invention provides fusion proteins comprising one, two or more, or three or more linkers comprising Thr or Ser, primarily comprising Thr or Ser, or generally consisting of Thr or Ser residues, as well as fusion proteins wherein the linkers of the fusion protein are mostly composed of, generally consist of, or consist of such Ser/Thr linkers, wherein the fusion protein exhibits detectably enhanced solubility due to the presence of the linker.

[0375] Linkers comprising a greater percentage of Ala or Ser residues typically show more stability than Gly-rich linkers. Stable linkers that can be incorporated into FPs can be formed from a mixture of such residues (Ala and Gly, Ser and Gly, or Ala, Gly, and Ser) or from only Ala/Ser residues.

[0376] In AOTI, the invention provides constructs encoding one or more FPs comprising Ser/Thr comprising linkers or Ser/Thr rich linkers, or a CT, which exhibit detectably enhanced, and in some aspects significantly enhanced resistance to proteolysis as compared to other linkers or that cause the fusion protein to exhibit enhanced, in some cases significantly enhanced, resistance to proteolysis (e.g., in the subject vertebrate). On example of a very stable linker is a mixture of about 11 Ala (e.g., 9-12 Ala residues) and about 5 Gly residues (4-6 Gly residues). Another example is a mixture of about 7 Ser (e.g., 5-8 Ser residues) and about 9 Gly residues (e.g., 8-10 Gly residues).

[0377] In AOTI, constructs of the invention encode fusion proteins comprising 1-25, 1-20, 1-15, 1-10, 1-8, or 1-5 linkers, such as 2-24, 2-18, 2-16, 2-12, 2-10, 2-8, or 2-6, or 3-21, 3-15, 3-12, 3-9, or 3-6 linkers, which linkers comprise 2-32 residues, commonly 2-20 residues, often 3-21 residues, 4-20 residues, 4-16 residues, or 4-12 residues, at least 33% of which or at least 50% of which are Gly residues, and optionally at least 10%, at least 20%, or at least 33% of which are Ser, Thr, or a mixture thereof.

[0378] Additional exemplary flexible linkers that can be in FPs OTI include linkers comprising, GCO, or consisting of a sequence according to one of the following formulas: (GGGGS)n wherein n is 1-8, 1-6, 1-4, 1-3, 2-3, or 3; GGGS (SEQ ID NO: 460)), with n being 1-10, 1-6, or 1-3; SGGG (SEQ ID NO: 461))n with n being 1-10, 1-6, or 1-3; (Gly)₂₋₁₂, (e.g., Gly₄, Gly₃, Gly₆, and Gly₈). Specific examples of such linkers include SEQ ID NOs: 458-474 and SG, and linkers including CTs or repeats thereof (e.g., 2×, 3×, or 4× of any thereof).

[0379] In AOTI, linkers in FPs PC, GCO, or CO linkers that are ≥3 AAs in length. In AOTI, linkers of FPs are ≥4 AAs in length, e.g., ≥5 AAs in length.

[0380] In aspects, FPs comprise linker(s) that comprises 1+ Ala residues. In AOTI, such a linker is longer than 2 residues in length, such as Ala-Ala-Ala (AAA) or SEQ ID NO:475. In AOTI, the fusion protein comprises a linker that comprises Ala residues mixed with other types of amino acid residues.

[0381] In some aspects, such a linker may comprise one or more Glu or one or more Lys residues dispersed throughout the Gly, Ser, or Gly-Ser mixture to increase solubility of the linker. Glu or Lys residues also can be incorporated in Ala-comprising or Ala-rich residues. Tyr residues can be incorporated into either such type of linker sequence.

[0382] In AOTI, the fusion protein comprises one or more linkers comprising Ala and at least one Glu (E) residue, at least one Tyr (Y) residue, or a combination thereof. Such linkers are typically considered rigid or at least relatively more rigid and associated with less rotation/free movement than the flexible linkers described above. Examples of such “rigid” linkers include linkers according to the formulas: (EAAAK (SEQ ID NO:476))₁₋₄, SEQ ID NO: 477, and A(EAAAK)₁₋₄ALEA(EAAAK)₁₋₄A, e.g., SEQ ID NO:478. Linkers with similar compositions include SEQ ID NOs: 479 and 480.

[0383] Other linkers can comprise Pro residue(s). Such linkers are also typically rigid or relatively rigid (e.g., as compared to a flexible linker). An example of such a linker is SEQ ID NO:481. In AOTI, such a linker PC, GCO, or CO Gly & Pro AAs or Ala & Pro AAs. Longer Pro-containing linkers can form loop structures, which can be incorporated into fusion proteins of the invention. An example of such a linker is SEQ ID NO:482, which forms a 281 degree turn loop. EPs associated with similar linkers that can form 90+, 120+, 150+, 180+, 210+, 240+, or 270+ degree turns are AOTI.

[0384] Still other linkers comprise F, L, I, or V residues in combination with any of the residues discussed above. Examples of such linkers include G-F-L and G-F-L-G (SEQ ID NO:483) linkers, A-L-A-L (SEQ ID NO:484) linkers, V-A linkers, V-K linkers, V-K linkers, V-C inkers, and V-R linkers, and mixtures or repeats thereof (e.g., repeats of 2×, 3×, 4×, or 5× thereof or of a mixture of any thereof). Other examples of such linkers include SEQ ID NOs: 485-487 and GIG, and repeats/combinations thereof. In aspects, such linkers can further include an Arg residue (e.g., a RIG sequence linker).

[0385] In some aspects, linkers also or alternatively may contain cysteine residues, for example, if dimerization of linkers is used to support or facilitate multimerization of a multimeric polypeptide (e.g., a Trap protein, examples of which are discussed further herein) into its properly folded configuration. Such linkers may also or alternatively comprise a longer multimerization domain or a domain that contributes to multimerization.

[0386] In certain embodiments, linker(s) comprise a glycosylation sequence. In certain embodiments, the linker comprises an amino acid sequence according to Asn-Xaa-Ser/Thr/Cys where Xaa is any amino acid or, in certain embodiments, wherein Xaa is any amino acid except Pro and Ser/Thr/Cys is serine, threonine or cysteine. In certain embodiments, the linker comprises the amino acid sequence Asn-Ala-Ser. In certain embodiments, the linker is a glycosylation sequence. In AOTI, linker(s) comprise AARSs according to Asn-Xaa-Ser/Thr/Cys where Xaa is any AA or, in certain embodiments, wherein Xaa is any amino acid except Pro and Ser/Thr/Cys is serine, threonine or cysteine. In certain embodiments, the linker is the amino acid sequence Asn-Ala-Ser. However, in other aspects, most, generally all, or all of the linker sequences of the fusion protein are free of any potential glycosylation sites.

[0387] Additional examples of suitable linkers are generally described in, e.g., U.S. Pat. Nos. 5,990,275, 6,010,883, 6,197,946, and EP 0 035 384. If separation of AARSs is desirable, a linker that facilitates separation can be used in FPs. An example of such a linker is described in U.S. Pat. No. 4,719,326. Additional PMCs are described in, e.g., Schellenberger et al., Nature Biotechnol. 27:1186-1190, 2009; Sickmeier et al., Nucleic Acids Res. 35:D786-93, 2007); Chen X, et al. Adv Drug Deliv Rev. 2013; 65(10):1357-1369. doi:10.1016/j.addr.2012.09.039; Arai R et al. Protein Eng. 2001; 14(8):529-532. doi:10.1093/protein/14.8.529; & Reddy Chichili V P et al. Protein Sci. 2013; 22(2):153-167. doi:10.1002/pro.2206. Any suitable linkers from these source or other sources KITA can be incorporated where suitable. As such, FPs can comprise one or more “linking means”, such as a “flexible linking means” or a “rigid linking means”, which will, in such contexts, refer to the linkers provided herein and their equivalents KITA.

[0388] In AOTI, a gDAgFP or other FP EP will comprise 1+ linkers that are at least four amino acids in length and that detectably enhances one or more antigen-specific immune responses to one or more Ags in the fusion protein or other expression product as compared to a corresponding fusion protein comprising only a 2-residue (two-mer) or 1-residue linker or lacking any linker.

[0389] In AOTI, constructs comprise a furin-sensitive linker (e.g., SEQ ID NO:488) or furin-resistant linker (e.g., SEQ ID NO: 489). In aspects, linker(s) include linkers including glycosylation site(s) (e.g., SEQ ID NOs: 490-493).

### iv. Cleavage Sites

[0390] In aspects, FPs comprise ≥1 cleavage sites that facilitate the separation of referenced sequences/domains. A cleavage site is a sequence that is specifically targeted and cleaved by an enzyme or a limited set of enzymes (a “cleavage partner”). The introduction of cleavage sites can be used to facilitate breaking up the fusion protein into two or more parts.

[0391] A fusion protein can comprise any suitable number of cleavage sites (which are sometimes also called “cleavage signals”). For example, a fusion protein can comprise one, two, three, four, five, or more cleavage sites (e.g., 1-10, 1-8, 1-6, 1-3, or 1-2 sites). A cleavage site may be located at the N-terminus, the C-terminus, between the N- and the C-termini, e.g., about half-way between the N- and C-termini, between the N-terminus and the mid-point, between the half way point and the C-terminus, or CT.

[0392] Cleavage sites of FPs may be any suitable type of cleavage sites. Numerous types of cleavage signals are KITA. Examples include proprotein convertase (or prohormone convertase), thrombin, and Factor Xa protein cleavage signals. Another example is a furin cleavage site. Examples of such cleavage sites are described in, e.g., U.S. Pat. No. 7,374,930, US20090227660 & Jenny R J, et al. Protein Expr Purif. 2003; 31(1):1-11. doi:10.1016/s1046-5928(03)00168-2. Additional known cleavage sites include GSF-S-S-Tf, IFN-α2b-HAS, FIX-albumin (e.g., VSQTSKLTR↓AETVFPDV, SEQ ID NO: 494)(the down arrow indicating the point of cleavage); LAPIFN-β; MazE-MazF (e.g., PLG↓LWA, EDVVCC↓SMSY, and GGIEGR↓GS) (SEQ ID NOS: 495-497), immunotoxin (e.g., TRHRQPR↓GWE, AGNRVRR↓SVG, RRRRRRR↓R↓R, and GFLG↓(SEQ ID NOs: 498-501), and G-CSF-Tf and hGH-Tf cleavage sites, which are variously cleavable by protease, Factor Xia/FVIIa, Matrix metalloprotease-1, HIV-1 protease, NS3 protease (HCV protease), Factor Xa, Cathespin B, and Furin. An example of a factor Xa-sensitive cleavage site is SEQ ID NO:502 (see, for example, Nagai and Thøgersen (1984) Nature 309:810-812, Nagai et al (1987) Meth. Enzymol. 153:461-481, & Pryor and Leiting (1997) Protein Expr. Purif. 10(3):309-319. Examples of thrombin-sensitive cleavage sites include SEQ ID NOs: 503 and 504 (SFE Pryor and Leiting (1997) Protein Expr. Purif. 10(3):309-319, & Hong et al. (1997) Chin. Med. Sci. J. 12(3):143-147). Cleavage sites for TEV protease also are KITA (SFE U.S. Pat. No. 5,532,142). Additional cleavage site-directed enzymes that act on known cleavage sites include tobacco etch virus protease, trypsin proteases, SUMO proteases, Human Rhinovirus HRV2C proteases, enterokinase, V8 protease, α-lytic protease, etc. Cleavage sites for these enzymes also are KITA.

[0393] In methods, FPs comprising 1+ of these or similar cleavage sites can be co-administered with the cleavage partner or with a nucleic acid that encodes the cleavage partner to promote the cleavage of the referenced sequences or domains. In aspects, the invention provides compositions comprising nucleotide sequences that encode at least one cleavage site and at least one cleavage partner, which facilitates cleavage of the fusion protein.

### a. “Self-Cleavage” Sites (SCSs)

[0394] In AOTI, FPs encoded by constructs comprise one or more “self-cleavage” sites (“SCSs”), such as a 2A self-cleaving peptide site. 2A sequences can induce the cleavage of a recombinant protein following expression without requiring the expression or co-administration of a cleavage partner. Although these sequences are known in the art as “self-cleavage” peptides, it is believed that they are likely cleaved through internal processes of the cell. Regardless of how cleavage occurs with such sequences, a “self-cleavage” site herein means any cleavage site that is effective at specifically inducing the cleavage of the fusion protein at the site without the co-administration or co-expression of a cleavage partner/enzyme.

[0395] In one aspect the fusion protein comprises 2A cleavage site(s), such as 2, 3, 4, 5, or more cleavage sites. In AOTI, one, some, most, or all of the 2A cleavage sites are selected from P2A, E2A, F2A and T2A cleavage sites (e.g., SEQ ID NOs:505-508, respectively).

[0396] In AOTI, OSMGAOA 2A sequences incorporated in FP(s) are a T2A or a P2A sequence. An exemplary T2A sequence is incorporated into some of the exemplary vector constructs described in detail in this description.

[0397] In AOTI, a linker, such as a flexible linker, is added to the N terminus, C terminus, or both, of SMGAOA of the 2A sequences incorporated into FPs. For example, In AOTI, the sequence GSG is added to the N-terminus, C-terminus, or both of a 2A sequence, such as one of the sequences described in this paragraph. In AOTI, the addition of the linker detectably or significantly enhances the rate of cleavage of the fusion protein.

[0398] In aspects, self-cleavage site(s) AOA are associated with a 2^{nd} cleavage site that can be acted on by a cleavage partner. In one example, a FP comprises a 2A self-cleavage site in addition to a furin cleavage site. In such aspects, a method of the invention can comprise administering the cleavage partner or a composition can comprise a sequence encoding the fusion partner.

[0399] Although FPs can comprise multiple self-cleavage sites, some 2A systems have been associated with lower levels of expression of intended final products in multi-cistronic systems. As such, In AOTI, the fusion protein will comprise only one 2A site. However, recent research is demonstrating that bicistronic, tricistronic, and even quadcistronic 2A systems (such as TPE2A sequences) can be useful and that other 2A systems are more effective than others in such systems. Liu Z et al. Sci Rep. 2017; 7(1):2193. Published 2017 May 19. doi:10.1038/s41598-017-02460-2. Related PMCs are further described in, e.g., Szymczak-Workman, A. L et al (2012). Cold Spring Harbor Protocols. 2012 (2): 199-204. doi:10.1101/pdb.ip067876. ISSN 1559-6095 and Thiel, Volker (ed.). PLoS ONE. 6 (4): e18556. doi:10.1371/journal.pone.0018556. ISSN 1932-6203.

[0400] Another type of self-cleavage sequence is an intein sequence, which provides polypeptide splicing-like functionality. In another aspect of the invention, cleavage products, modified products, and even combinations thereof can be obtained by expressing polypeptides with intein sequences contained in the fusion protein, and such means/methods may be used to obtain multiple expression products and, thus, incorporated into fusion proteins and encoded by constructs of the invention. Application of intein technology to such ends has been exemplified in the art and other applications of intein sequences in fusion protein are also known. SFE Zhang B, et al. Sci Rep. 2015; 5:8541. Published 2015 Feb. 25. doi:10.1038/srep08541 & US20200002743A1. Intein sequences also have been successfully used to re-fuse separately expressed sequences, and such sequences can AOA be incorporated into or used in other method/compositions AOTI, e.g., as a strategy for overcoming packaging size limitations of viral vectors, a method KITA (e.g., with AAV vectors).

### b. IRES Elements

[0401] Translation in eukaryotes usually begins at the 5′ cap so that only a single translation event occurs for each mRNA. However, some bicistronic vectors take advantage of an element called an Internal Ribosome Entry Site (IRES) to allow for initiation of translation from an internal region of the mRNA. An IRES is an RNA domain which enables efficient translation of an mRNA lacking a 5′ cap structure. IRES elements have now been found in many different viral families where they often confer a selective advantage to allow ribosome recruitment under conditions where cap-dependent protein synthesis is severely repressed. In one aspect of the invention a nucleotide sequence, such as a nucleotide sequence incorporated into a viral vector or nucleic acid vector, such as an RNA vector comprises one or more IRES elements. In AOTI, such a construct comprises one or more IRES elements that are highly identical, substantially identical, or comprise a sequence identical to at least a functional portion of a naturally occurring virus from a RNA positive stranded virus. In AOTI, the IRES is an IRES isolated from or that is at least highly identical or substantially identical to a naturally occurring IRES that occurs in picornaviruses, flaviviruses; dicistroviruses; or a lentiviruses. IRES elements are generally described in, e.g., Balvay L, Soto Rifo R, Ricci E P, Decimo D, Ohlmann T. Structural and functional diversity of viral IRESes. Biochim Biophys Acta. 2009; 1789(9-10):542-557. doi:10.1016/j.bbagrm.2009.07.005. An IRES element can act as another ribosome recruitment site, thereby resulting in co-expression of two proteins from a single mRNA. Thus, In AOTI, the constructs of the invention are multi-cistronic, at least in part, due to the incorporation of one or more IRES sites. In AOTI, the vector or construct comprises only one IRES element, such that the construct or vector is a bicistronic construct/vector. Examples of bicistronic vectors comprising IRES elements are described in, e.g., Santana V C, Diniz M O, Cariri F A, et al. Bicistronic DNA vaccines simultaneously encoding HIV, HSV and HPV antigens promote CD8⁺ T cell responses and protective immunity. PLoS One. 2013; 8(8):e71322. doi:10.1371/journa.pone.0071322; Harries M et al. J Gene Med. 2000; 2(4):243-249. doi:10.1002/1521-2254(200007/08)2:4<243::AID-JGM115>3.0.CO; 2-Q. However, in other aspects multiple IRES are contained in a construct to make or contribute to a multi-cistronic expression property of the construct. Such constructs are known in the art (SFE Yeo J H M et al. Methods Mol Biol. 2018; 1827:335-349. doi:10.1007/978-1-4939-8648-4_17). In AOTI, an IRES-comprising vector is a non-viral vector (e.g., in one AOTI provides a multi-IRES vector that is a non-viral vector).

[0402] In AOTI, vectors or constructs of the invention incorporate two or more means for providing multi-gene/multi-cistronic expression, such as a splicing sequence and an IRES, an IRES and a 2A peptide, a bidirectional promoter and one or more 2A sequences, or multiple expression cassettes at least one of which comprise an IRES, splicing signal, or 2A sequence. In one exemplary aspect, constructs/vectors comprise 1+2A peptides and 1+ IRES elements. In one such example, a construct produces ≥three EPs from a single transcript due to the coordination of 2A sequence(s) and an IRES.

### v. Signal/Leader Sequences

[0403] As noted above, a coding sequence can encode an immature protein that is subsequently processed in the cell or tissue in which it is expressed. One element of an immature protein of functional significance in aspects of the invention is a signal sequence (sometimes also called a “leader sequence” and which may also be referred to as secretory peptide/sequence or signal peptides). Signal sequences can direct the transport of an associated immature polypeptide within or from a cell. For example, such sequences can direct secretion of a polypeptide encoded by a nucleic acid fragment or polynucleotide of the present invention from a cell. A signal sequence typically will be located in the N-terminus of the polypeptide, which is cleaved from the complete or “full length” polypeptide to produce a secreted or “mature” form of the polypeptide. In some cases, such sequences are cleaved from a mature or intermediate form of a protein once export of the growing protein chain across the rough endoplasmic reticulum (“ER”) has been initiated. In certain embodiments, a native leader sequence is expressed with an associated polypeptide sequence (as is the case in certain embodiments of the invention wherein a gD leader sequence or highly homologous variant thereof is expressed along with other gD sequences, such as a gD:antigen fusion protein). In other aspects, constructs of the invention include a heterologous leader sequence (with respect to the associated mature protein). For example, a gD leader sequence can be associated with other sequences, such as one or more antigen sequences. Other leader sequence are known in the art and can be used, where suitable, to develop other heterologous leader sequence/mature polypeptide combinations, including the human tissue plasminogen activator (TPA) leader sequence and mouse β-glucuronidase leader sequence. Signal peptides may be employed that direct transmembrane proteins to the cell surface or different signal peptides may be used that promote the secretion of a soluble form of the protein. A variety of secretion signal sequences are described in the art and several examples of such sequences are now contained in the Signal Peptide Database (http://www.signalpeptide.de/). The use of gD signal sequences is specifically discussed further below. Further examples of signal sequences are described in, e.g., U.S. Pat. Nos. 4,690,898, 5,284,768, 5,580,758, 5,652,139, & 5,932,445. Suitable signal sequences can be identified using e.g., the SignalP program (described in, e.g., Nielsen et al. (1997) Protein Engineering 10:1-6), available through the Center for Biological Sequence Analysis at https://services.healthtech.dtu.dk/service.php?SignalP-5.0. Sequences can be manually analyzed to identify signal sequences, as described in, e.g., EP 0 621 337, Zheng and Nicchitta (1999) J Biol Chem 274(51): 36623-30, and Ng et al. (1996) J Cell Biol 134(2):269-78.

### vi. Targeting Domains/Sequences

[0404] Constructs of the invention can also or alternatively encode fusion proteins comprising one or more targeting domains/sequences (which also sometimes and in some contexts are referred to as “localization sequences”, “targeting domains”, and the like), that can, at least in some cases, be considered distinct from classical signal sequences (discussed above), but which also can direct the transport of the associated polypeptide, processing of the polypeptide to cells within an organism, in the cell, or both.

[0405] Distinctions between such sequences and typical signal sequences include targeting of a specific organelle outside of the secretion organelles, targeting of particular cellular receptors (and thus, cells), often having larger or smaller lengths than typical signal sequences (less than the 15-30 amino acid length associated with most signal peptides or more than about 30 amino acids in some cases), placement of the targeting sequence outside of the N-terminus of the polypeptide, lack of cleavage from the polypeptide, or a combination of any or all thereof. Thus, such distinctions may not be binding.

[0406] EP(s) can comprise targeting sequences (TS(s)) (e.g., PTPS sequences and gD sequences that bind to particular receptors). FPs expressed by constructs included in compositions of the invention can also or alternatively, typically alternatively, target any other suitable target, whether intracellularly or extracellularly. FPs expressed by constructs in CEPESCs that comprise TS(s) other than gD RBD sequences can still include gD sequences (e.g., a gD profusion domain sequence, a gD signal sequence, or both) or such fusion proteins can lack any gD sequences, e.g., where such a fusion protein is encoded by a second NAM of a composition and expressed in combination with a gD:antigen fusion protein. Examples of non-gD extracellular molecules that can be bound by non-gD targeting sequences included in fusion proteins expressed by constructs of the invention include, e.g., include MHC class I, MHC class II, CD1, CD2, CD3, CD4, CD8, CD11b, CD14, CD15, CD16, CD19, CD20, CD29, CD31, CD40, CD43, CD44, CD45, CD54, CD56, CD57, CD58, CD83, CD86, CMRF-44, CMRF-56, DCIR, DC-ASPGR, CLEC-6, CD40, BDCA-2, MARCO, DEC-205, mannose receptor, Langerin, DECTIN-1, B7-1, B7-2, IFN-γ receptor and IL-2 receptor, ICAM-1, Fcγ receptor, T cell receptor, or lectin, or any of the other various immune cell receptors described herein. In AOTI, a composition comprising sequences encoding a gD:antigen fusion protein and a non-gD targeting sequence:antigen fusion protein (e.g., a DEC-205-binding: antigen fusion protein expressed by one NAM and a gD:antigen fusion protein expressed by a second NAM of a composition).

[0407] As noted above, a targeting sequence can target an intracellular target, such as an organelle (e.g., the ER or the proteasome) or an extracellular target, such as a receptor on a cell that is different from COE (e.g., a dendritic cell receptor). A composition of the invention can comprise nucleotide sequences encoding one or more of each type of targeting sequence or a combination of such targeting sequences (e.g., in one aspect a fusion protein comprises (a) at least one extracellular targeting sequence, such as dendritic cell receptor-binding sequence, which can be a gD sequence or a heterologous dendritic cell receptor binding sequence, and (b) at least one intracellular targeting sequence, such as a PTPS or ERTPS). A fusion protein can also comprise a signal sequence in addition to an intracellular targeting sequence, extracellular targeting sequence, or a combination thereof.

[0408] For example, a vector of the invention, such as a viral vector, can include a nucleotide sequence encoding a genetically engineered antigen receptor, such as a chimeric antigen receptor (CAR) (vector targeting is also discussed elsewhere herein). Other examples of localization sequences that can be encoded by constructs of the invention include, e.g., a nuclear localization sequence, an endoplasmic reticulum localization sequence, a peroxisome localization sequence, or a mitochondrial localization sequence. Localization sequences are known in the art and are described in, e.g., “Protein Targeting”, chapter 35 of Stryer, L., Biochemistry (4th ed.). W. H. Freeman, 1995. Examples of known localization sequences include those targeting the nucleus (e.g., SEQ ID NO:509), mitochondrion (SEQ ID NO:510), endoplasmic reticulum (KDEL (SEQ ID NO:511)), peroxisome (SKF), prenylation or insertion into plasma membrane (CAAX (SEQ ID NO:512), CC, CXC, or CCXX (SEQ ID NO:513)), cytoplasmic side of plasma membrane (fusion to SNAP-25), or the Golgi apparatus (fusion to furin). Other examples of heterologous signal peptides that are functional in mammalian host cells include the signal sequence for interleukin-7 (IL-7) described in U.S. Pat. No. 4,965,195; the signal sequence for interleukin-2 receptor described in Cosman et al., Nature 312:768 (1984); the interleukin-4 receptor signal peptide described in EP 367,566; the type I interleukin-1 receptor signal peptide described in U.S. Pat. No. 4,968,607; and the type II interleukin-1 receptor signal peptide described in EP 460,846. Polypeptides expressed from constructs of the invention can include an intracellular targeting sequence (or “sorting signal”) that directs the polypeptide to an endosomal and/or lysosomal compartment(s), for example a compartment rich in MHC II to promote CD4+ and/or CD8+ T cell presentation and response, such as a lysosomal/endosomal-targeting sorting signal derived from lysosomal associated membrane protein 1 (e.g., LAMP-1—SFE Wu et al. Proc. Natl. Acad. Sci. USA 92:1161-75 (1995) and Ravipraskash et al., Virology 290:74-82 (2001)), a portion or homolog thereof (SFE U.S. Pat. No. 5,633,234), or other suitable lysosomal, endosomal, and/or ER targeting sequence (SFE U.S. Pat. No. 6,248,565). Additional examples of targeting sequences include endoplasmic reticulum (ER) targeting/processing sequences such as SEQ ID NO: 511), lysosomal targeting sequences, such as SEQ ID NO:514, or other ER or Golgi retention sequences having a structure according to the formula KKXX (SEQ ID NO: 515) or the formula KXD/E (where X can be any AA) or comprising the SEQ ID NO: 516 (see Zhan J, et al, Cancer Immunol Immunother 46:55-60, 1998). ER targeting/processing sequences are discussed below.

[0409] In AOTI, TS(s) allow a FP to DOS bind target(s) and remain detectably associated with the target or processed by the target (e.g., taken into a cell) under relevant physiological conditions (e.g., at a pH of about 7-8 and a temperature of about 37° C., such as at a temperature of from about 20° C. to about 40° C. (for example, room temperature), and a pH of about 7.5, or other suitable combination of temperature, pH, and other conditions) for a significant period of time (e.g., a period at least about 30 minutes, at least about 45 minutes, at least about 1 hour, at least about 4 hours, at least about 8 hours, or longer such as about 1-12 hours, about 1-24 hours, about 1-36 hours, about 1-48 hours, about 1-72 hours, etc.)). In AOTI, the targeting sequence specifically binds the fusion protein to its target. The concept of specific binding between biomolecules is discussed elsewhere herein.

[0410] In AOTI, TS(s) do not exhibit DOS binding of other sequences in the FP, other than the binding of between any multimerization domains of the fusion protein sequence, in which each expressed polypeptide chain of a fusion protein results in a multimeric fusion protein. In some aspects, the fusion protein forms a multimeric peptide. In other aspects, the fusion protein lacks any multimerization domains. Like other constituent sequences, the targeting sequence also typically does not result in a significant or detectable response, or does not result in an initial immune response that is considered clinically significant in view of the therapeutic effect of expressing the fusion protein in the intended species. Also, as with other components of a fusion protein, the targeting sequence(s) of the fusion protein do not detectably or significantly interfere with the functioning of the other components of the fusion protein (e.g., the promoting, induction, or enhancement of an immune response).

[0411] In AOTI, a fusion protein can be characterized as being multivalent, multi-specific, with respect to extracellular targets, intracellular targets, or both types of targets, and also or alternatively can be monomeric (single chain) or multimeric (formed from the association of two or more polypeptide chains, typically two or more expression products of a composition of the invention, and, accordingly, having a quaternary structure). Valency refers to the number of binding sequences/regions/domains in a biomolecule and, accordingly, provides an indication of the maximum number of targets/molecules that can be bound by a fusion protein or other molecule (e.g., an antibody). Specificity refers to the ability to specifically bind one or more targets (a bi-specific antibody, for example, exhibits specific binding to two, typically heterologous targets). Such aspects are further discussed below.

[0412] In AOTI, a multimeric FP (e.g., a multivalent multimeric fusion protein) exhibits detectably or significantly increased binding for one or more targets than a corresponding monomeric polypeptide. In aspects, a multimeric fusion protein of the invention exhibits detectably or significantly enhanced immunological response, such as more rapid antigen presentation, a more rapid B cell response, a more rapid T cell response, or a combination of any or all thereof (e.g., due to the more rapid processing of larger antigens by APCs).

[0413] In AOTI, the immune cell targeting sequence can be characterized as specifically binding to one or more such immune cell receptors (specifically examples of such receptors are provided below). The term “specific binding” or “specifically binds to” or is “specific for” a particular polypeptide can be exhibited by the binding sequence detectably or significantly binding the referenced binding target (e.g., the immune cell receptor) preferentially as compared to any other polypeptides in the environment.

[0414] In AOTI, a part of a fusion protein of the invention that binds to a partner will bind that partner with essentially equivalent (+/−15%) of the affinity, avidity, speed, duration, or combination of any or all thereof of one or more wild-type counterpart(s) (most related wild type polypeptide or sequence to the binding sequences). In other aspects, the fusion protein will bind to the partner with a detectably enhanced or significantly enhanced binding affinity, avidity, speed, duration, or combination of any or all thereof, such as an affinity that is at least about 15% greater, at least about 25% greater, at least about 33% greater, at least about 50% greater, or at least about 100% greater (i.e., about 2× in value, such as at least about 2.5× or at least about 3× in value) the affinity, avidity, speed (Kₒₙ), duration (K_{off}), or combination of any or all thereof, of one or more corresponding wild-type proteins.

[0415] The principles described in this section relating to affinity and binding relationships between sequences can be applied to any other association described herein between sequences and binding partners (e.g., the association of two or more sequences that form a multimeric trap polypeptide expressed by a construct of the invention; the association between an epitope of the invention and an immune cell epitope recognition receptor; the association between a cytokine and a cytokine receptor; etc.). In other words, the affinities described herein can be applied to the binding of other sequences beyond immune cell targeting sequences and immune cell receptors.

[0416] In aspects, specific binding further means that the binding sequence does not bind a significant amount of any other polypeptide in the environment. In a particular aspect, specifically binding means that the binding sequence binds the indicated target or targets and does not detectably bind other polypeptides in the relevant environment.

[0417] “Binding affinity” generally refers to the strength of the sum total of noncovalent interactions between a single binding site of a molecule (e.g., an antibody) and its binding partner (e.g., an antigen). Unless indicated otherwise, as used herein, “binding affinity” refers to intrinsic binding affinity which reflects a 1:1 interaction between members of a binding pair (e.g., antibody and antigen). The affinity of a molecule X (e.g., a FP comprising one or more receptor binding sequences) for its partner Y (e.g., a receptor of an immune cell) can generally be represented by the dissociation constant (“Kd”). For example, the Kd can be about 200 nM, 150 nM, 100 nM, 60 nM, 50 nM, 40 nM, 30 nM, 20 nM, 10 nM, 8 nM, 6 nM, 4 nM, 2 nM, 1 nM, or stronger. In aspects, TS(s) or RBD(s) of EP(s) exhibit such levels of affinity for respective targets.

[0418] Affinity can be measured by common methods known in the art, including those described herein. Low-affinity relationships mean that binding partners bind slowly and tend to dissociate readily, whereas high-affinity binding relationships mean faster binding and longer association. Association rates (kon) and dissociation rates (koff) are often calculated using a simple one-to-one Langmuir binding model (BIAcore Evaluation Software version 3.2) by simultaneous fitting the association and dissociation sensorgram. The equilibrium dissociation constant (Kd) is calculated as the ratio koff/kon. SFE Chen et al., J. Mol. Biol. 293:865-881 (1999). A variety of methods of measuring binding affinity are known in the art, any of which can be used for purposes of the present invention. Examples of such methods include ELISAs, gel-shift assays, pull-down assays, equilibrium dialysis, analytical ultracentrifugation, SPR, and spectroscopic assays. Related methods and principles adaptable to AOTI are provided in Scatchard et al., Ann. N.Y. Acad. Sci. 51:660, 1949; and U.S. Pat. Nos. 5,283,173 & 5,468,614. Another similar method is isothermal titration calorimetry (ITC), a direct, label-free analytical technique which measures the binding affinity between any 2 interacting molecules (to nanomolar range), such as an ICR and ICRL. K_{d} values can also be measured by, e.g., using surface plasmon resonance assays (e.g., using a BIAcore™-2000 or a BIAcore™-3000 (BIAcore, Inc., Piscataway, N.J.) (e.g., at 25° C. with immobilized target CM5 chips at ^{˜}10 response units (RU)).

[0419] In AOTI, an “effectively binding” or “specifically biding” relationship also or alternatively can be characterized based on the binding sequence exhibiting a Kd for the target of at least about 200 nM, alternatively at least about 150 nM, alternatively at least about 100 nM, alternatively at least about 60 nM, alternatively at least about 50 nM, alternatively at least about 40 nM, alternatively at least about 30 nM, alternatively at least about 20 nM, alternatively at least about 10 nM, alternatively at least about 8 nM, alternatively at least about 6 nM, alternatively at least about 4 nM, alternatively at least about 2 nM, alternatively at least about 1 nM, or greater. In aspects, TS(s) or RBD(s) of EP(s) exhibit such levels of affinity for their target(s).

[0420] In aspects, an “effective binding” or “specifically binding” relationship can also or alternatively means that the referenced molecule binds its partner with a Ka (an equilibrium association constant) of greater than a threshold, such as equal to or greater than about 105 L·mol⁻¹ (or “M”)⁻¹. Ka reflects the speed of association between two molecules and is the inverse of Kd. In AOTI, a fusion protein will exhibit “high affinity” for a target, by exhibiting a Ka of at least about 107 M⁻¹, at least about 10⁸ M⁻¹, at least about 10⁹ M⁻¹, at least 10¹⁰ M⁻¹, at least 10¹¹ M⁻¹, at least 10¹² M⁻¹, or at least 10¹³ M⁻¹. constant) for the target antigen.

[0421] In still another aspect, an “effective binding” or “specific binding” relationship also or alternatively means that the K_{off} with respect to the fusion protein or other test product and the target is less than about 1×10⁻⁵ s⁻¹, such as less than about 5×10⁻⁴ s⁻¹, such as less than about 1×10⁻⁴ s⁻¹, such as less than about 5×10⁻³ s⁻¹ or less than about 1×10⁻³ s⁻¹. In AOTI, the fusion protein binds its target with a K_{off} of from about 1×10⁻⁴ s⁻¹ to about 1×10⁻² s⁻¹, such as about 1×10⁻⁴ s⁻¹ to about 5×10⁻² s⁻¹ or about 1×10⁻⁴ s⁻¹ to about 1×10⁻³ s⁻¹. In another aspect “effective binding” or “specific binding” can also or alternatively comprise binding with a Kₒₙ of more than about 0.01 M⁻¹s⁻¹, more than about 0.1 M⁻¹s⁻¹, more than about 1 M⁻¹s⁻¹, or more than about 5 M⁻¹s⁻¹. In AOTI, TS(s) or RBD(s) of EP(s) exhibit such affinity characteristics for target(s).

### a. Origin/Nature of Targeting Sequences

[0422] In one respect, TS(s) of EPs are characterized by origin/homology or in exhibiting relatedness to a sequence of a particular source.

### 1) Antibody Sequences

[0423] In AOTI, FP(s) comprise 1+ TS(s) of an Ab against the target compound (partner/target) a variant of such an antibody sequence that is RVRHROSI to one or more antibody sequence(s) that bind to the target.

[0424] AOTI relate to CEPESCs expressing Abs or Ab FPs. The description of Ab PPTs/AARSs provided here applies to both aspects of this disclosure except where specifically otherwise stated or clearly indicated by context.

[0425] An antibody against a referenced target herein, generally means any suitable type of antibody molecule that specifically binds to one or more portions of the referenced target, under cellular and/or physiological conditions for an amount of time sufficient to allow detection of such binding by suitable means (e.g., ELISA, Western blot, or other similarly suitable protein binding technique described herein and/or known in the art) and, typically, to detectably or significantly promote, induce, or enhance a cellular or physiological effect associated with such binding. The term antibody thus includes any suitable type of immunoglobulin molecule, a fragment of an immunoglobulin (e.g., a fragment that retains a target-binding fragment of an antibody molecule) that specifically binds to a specific target. The concept of specific binding between different binding peptides is discussed elsewhere in this disclosure, but the term as it applies to antibody sequences will also be generally understood by those of ordinary skill in the art.

[0426] Antibodies are ORT ITA as “immunoglobulins.” The term immunoglobulin generally refers to a class of structurally related proteins consisting of two pairs of polypeptide chains, one pair of light (L) low molecular weight chains and one pair of heavy (H) chains, all four inter-connected by disulfide bonds. The structure of immunoglobulins has been well characterized. SFE FUNDAMENTAL IMMUNOLOGY (Paul, W., ed., 2nd ed. Raven Press, N.Y. (1989)). Briefly, each heavy chain typically is comprised of a heavy chain variable region (abbreviated herein as HCVR or VH) and a heavy chain constant region comprised of three domains, CH1, CH2, and CH3. Each light chain typically is comprised of a light chain variable region (abbreviated herein as LCVR or VL) and a light chain constant region and a single constant region, CL. The VH and VL regions can be further subdivided into regions of hypervariability (or hypervariable regions, which can be hypervariable in sequence and/or form of structurally defined loops), also termed “complementarity determining regions” (CDRs), interspersed with regions that are more conserved, termed framework regions (FRs). In full length, naturally produced antibodies, each VH and VL typically is composed of three CDRs and four FRs, arranged from amino-terminus to carboxy-terminus in the following order: FR1, CDR1, FR2, CDR2, FR3, CDR3, FR4 (which also may be referred to as FR L1, CDR L1, etc. or loop L1, L2, L3 in the light chain variable domain and loop H1, H2, and H3 in the heavy chain domain in the case of hypervariable loop regions (SFE Chothia and Lesk J. Mol. Biol. 196:901-917 (1987)). The term “immunoglobulin” includes natural or artificial mono- or polyvalent antibodies including, but not limited to, polyclonal, monoclonal, multi-specific, human, humanized or chimeric antibodies, anti-idiotypic (anti-Id) antibodies.

[0427] The term “antibody,” as used herein, refers to immunoglobulin molecules and immunologically active portions of immunoglobulin molecules, i.e., molecules that contain an antigen binding site that immunospecifically binds an antigen. The immunoglobulin ion can be of any type/isoytpe (e.g., IgG, IgE, IgM, IgD, IgA, and IgY), class (e.g., IgG1, IgG2, IgG3, IgG4, IgA1, and IgA2) or subclass of immunoglobulin molecule. Target-binding functions of antibodies can be performed by any number of suitable “fragments” thereof. An antibody fragment can, for example, lack one or both constant domains of an antibody molecule. Examples of typically suitable antibody fragments include (i) a Fab fragment, a monovalent fragment consisting essentially of the VL, VH, CL and CH I domains; (ii) F(ab)2 and F(ab′)2 fragments, bivalent fragments comprising two Fab fragments linked by a disulfide bridge at the hinge region; (iii) a Fd fragment consisting essentially of the VH and CH1 domains; (iv) a Fv fragment consisting essentially of the VL and VH domains of a single arm of an antibody, (v) a dAb fragment (Ward et al., (1989) Nature 341:544-546), which consists essentially of a VH domain; and (vi) an isolated complementarity determining region (CDR). Furthermore, although the two domains of the Fv fragment, VL and VH, are coded for by separate genes, they can be joined, using recombinant methods, by a synthetic linker that enables them to be made as a single protein chain in which the VL and VH regions pair to form monovalent molecules (known as single chain antibodies or single chain Fv (scFv); see e.g., Bird et al. (1988) Science 242:423-426: and Huston et al. (1988) Proc. Natl. Acad. Sci. USA 85:5879-5883). Antibody molecules also can include diabodies (see e.g., Holliger, P., et al. (1993) Proc. Natl. Acad. Sci. USA 90:6444-6448; Poljak, R. J., et al. (1994) Structure 2:1121-1123). In aspects, antibody molecules can be linear antibodies, which comprise a pair of tandem Fd segments that form a pair of antigen binding regions (such antibodies can be bispecific or monospecific) (SFE Zapata et al. Protein Eng. 8(10):1057-1062 (1995). Any of these antibody “fragment” or antibody derivative molecules also are encompassed within terms such as antibody fragment and should be considered implicitly referenced as a separate aspect of any part of this disclosure that makes reference to the use, expression, or presence of an antibody in a composition or method of the invention, unless otherwise noted or clearly indicated by context (the term “fragment” is not meant to indicate any means of obtaining such an antibody molecule that lacks all of the components of a full length antibody). However, although having similar binding properties as full-length antibodies, such antibody “fragments” collectively and each independently are unique features of the invention, exhibiting different biological and/or physiochemical properties and utilities from full length antibodies. Nonetheless, it should be generally understood that any suitable antibody fragment can be used as a surrogate for an antibody in inventive compositions and methods described herein, and vice versa, unless otherwise stated or clearly contradicted by context. Thus, from the foregoing it should be clear that fusion proteins comprising antibody targeting sequences can comprise antibody “fragments” including either a VL or VH domain or an effective combination of CDRs or even an effective epitope-binding CDR. In some cases, inclusion of substantially all or all of an Ab CDR3, for example, may be sufficient to impart effective target binding to a fusion protein. SFE Zhong G S et al. Oncol Lett. 2013; 5(4):1183-1188. doi:10.3892/ol.2013.1143 as an example of such a minimized antibody fusion protein.

[0428] A number of Ag-binding immunoglobulin molecules and fragments can be used in the inventive methods described herein and/or included in CEPESCs. Non-limiting examples of immunoglobulin molecules that can be EPs or CCCs/AACs comprise (a) a complete functional, immunoglobulin molecule comprising: (i) two identical chimeric heavy chains comprising a variable region with a human B cell surface antigen specificity and human constant region and (ii) two identical all human (i.e. non-chimeric) light chains; (b) a complete, functional, immunoglobulin molecule comprising: (i) two identical chimeric heavy chains comprising a variable region as indicated, and a human constant region, and (ii) two identical all non-human (i.e. non-chimeric) light chains; and (c) a monovalent antibody, i.e., a complete, functional immunoglobulin molecule comprising: (i) two identical chimeric heavy chains comprising a variable region as indicated, and a human constant region, and (ii) two different light chains, only one of which has the same specificity as the variable region of the heavy chains. As noted above, Ab molecules also or alternatively include antibody fragments, such as an scFv; a Fab fragment; a Fab′ fragment; a F(ab′)2 fragment; an Fv molecule; and a disulfide linked Fv molecule.

[0429] Methods of antibody production are known in the art and include those described in, e.g., Harlow and Lane: ANTIBODIES; A LABORATORY MANUAL, supra; Harlow and Lane: USING ANTIBODIES: A LABORATORY MANUAL (Cold Spring Harbor Laboratory Press (1999)); U.S. Pat. Nos. 4,376,110; 4,946,778; THE PHARMACOLOGY OF MONOCLONAL ANTIBODIES, vol. 113, Rosenburg and Moore eds. Springer-Verlag, New York, pp. 269-315 (1994), Bird et al. (1988) Science 242:423-426; Huston et al. (1988) Proc. Natl. Acad. Sci. USA 85:5879-5883; & McCafferty et al., Nature (1990) 348:552-554. Monoclonal antibodies (mAbs), for example, may be made using the hybridoma method first described by Kohler et al., Nature, 256:495 (1975), or by other well-known, subsequently-developed methods (SFE Goding, MONOCLONAL ANTIBODIES: PRINCIPLES AND PRACTICE, pp. 59-103 (Academic Press, 1986)). As such, Abs here can refer to Abs against targets that are already known in the art, may be commercially available, or that are generated against a target using such methods.

[0430] FPs can comprise any suitable combination of Ab sequences that facilitate binding of referenced target(s). Antibody fusion proteins are known in the art and the principles and strategies applied to such known antibody fusion proteins can be applied to generate antibody fusion proteins comprising one or more gD domains, one or more antigenic sequences, or both, and possibly other components of the fusion proteins discussed herein (e.g., an ITII).

[0431] In AOTI, a fusion protein of the invention comprising antibody target binding sequences will result in a single chain fusion protein. Single chain antibody fusion proteins and related techniques and principles applicable to generation of such fusion proteins are exemplified in, e.g., Zaneti A B et al. Front Immunol. 2019; 10:59. doi:10.3389/fimmu.2019.00059; Ahmad Z A et al. Clin Dev Immunol. 2012; 2012:980250. doi:10.1155/2012/980250; De Vlaeminck Y et al. J Control Release. 2019; 299:107-120. doi:10.1016/j.jconrel.2019.02.023; Fellermeier S et al. Oncoimmunology. 2016; 5(11):e1238540. doi:10.1080/2162402X.2016.1238540; Peter K et al. Circulation. 2000; 101(10):1158-1164. doi:10.1161/01.cir.101.10.1158; US20020018783A1, US20190202931A1, and U.S. Pat. No. 5,990,296. In aspects, a fusion protein comprising antibody targeting sequences will comprise a multimerization domain, typically an antibody multimerization domain, thereby forming a multimeric, often multivalent (e.g., bivalent, trivalent, or tetravalent), and sometimes multi-specific (e.g., bispecific) antibody fusion protein. Examples of multivalent/multimeric antibody fusion proteins and related techniques and principles are described in, e.g., EP2516458, EP3615564A1, WO2011036460A1, WO2019129053A1, US20180216093A1, and Fang F et al. J Antimicrob Chemother. 2004; 53(1):23-25. doi:10.1093/jac/dkh019. Additional aspects relating to multivalent/multimeric fusion proteins expressed by constructs of the invention are described below. Additional examples of antibody fusion proteins and related principles and techniques which may be applicable to the design of constructs comprising antibody targeting sequences, multimerization domains, or both are provided in, e.g., US20200115455, US20140023592, US20170210818, US20180201689, US20190298848,US20190225700A1,US20200115455,U.S. Pat. No. 9,102,734, EP3541941A4; Hamilton A A et al. Methods Mol Biol. 1998; 80:427-438. doi:10.1007/978-1-59259-257-9_43; Reisfeld R A et al. Curr Top Microbiol Immunol. 1996; 213 (Pt 3):27-53. doi:10.1007/978-3-642-80071-9_3; Rohrbach P et al. Biotechnol Genet Eng Rev. 2003; 20:137-163. doi:10.1080/02648725.2003. Ser. No. 10/648,041; and ANTIBODY FUSION PROTEINS (1999) S. M. Chamow and A. Ashkenazi, ed., Wiley-Liss (ISBN-10 0-471-18358-X).

[0432] Antibodies and other compositions (e.g., antigens, cytokines, adjuvants, vectors, linkers, and the like) described in the references cited in the preceding paragraph also can be considered when considering combination therapy/immunization aspects of the invention and compositions comprising constructs of the invention. This principle also can be applied to other references cited and incorporated herein. More aspects of CCs and combination therapy/immunization methods are described below.

[0433] In AOTI, antibody fusion proteins can exhibit one or more DOS “antibody effector functions,” such as Clq binding; complement dependent cytotoxicity; Fc receptor binding; Ab-dependent cell-mediated cytotoxicity (ADCC); detectably inducing/enhancing phagocytosis, down regulation of cell surface receptors (e.g., B cell receptor (BCR); cross-presentation of antigens by antigen presenting cells/dendritic cells; or a combination of any or all thereof. In AOTI, an antibody targeting sequence fusion protein will exhibit two or more of such functions. In other aspects, a fusion protein comprising one or more antibody targeting sequence will exhibit no effector functions.

### 2) Non-Antibody Ligand Sequences

[0434] In aspects, FPs comprise one or more targeting sequences that are non-antibody sequences, having no identity or substantial identity to any known epitope binding antibody sequences for the target or, in some aspects, for any target. In AOTI, fusion proteins of the invention lack any antibody targeting sequences other than CDR and FR sequences. In AOTI, a fusion protein of the invention lacks any antibody targeting sequences. In AOTI, a fusion protein of the invention lacks any antibody sequence (e.g., comprises no sequence of more than about 50 amino acid residues, more than about 35 amino acid residues, or even more than about 25 amino acid residues exhibiting substantial identity to an antibody sequence).

[0435] A fusion protein expressed by a construct of the invention can comprise any suitable number of ligand/receptor sequences. In AOTI, a fusion protein comprises only a single extracellular targeting domain (e.g., a gD receptor-binding domain that binds to a single gD receptor in a target species, such as Nectin-1). In other aspects, a fusion protein can comprise one or more sequences that bind to two or more extracellular targets, such as a single gD sequence that binds to multiple receptors (e.g., HVEM and Nectin-1) or two heterologous sequences that target different receptors (e.g., a DEC-205-binding keratin sequence and a HVEM-binding gD sequence). In any such case, such a fusion protein can also comprise one or more intracellular targeting domains (e.g., a PTPS, a ERTPS, or both).

[0436] Non-antibody targeting sequences can comprise any portion of a polypeptide that specifically binds to a target. Binding sites from a receptor-ligand pair are non-limiting examples of domains that, in a manner akin to an antibody-epitope interaction, may be used as targeting sequences, similar to how in aspects of the invention a receptor-binding gD domain may be incorporated to bind a gD polypeptide to a gD receptor (e.g., Nectin-1). Further exemplary non-antibody targeting sequences include antibody mimetics, such as polypeptide scaffolds that mimic the structure of an antibody.

[0437] FPs can comprise any suitable ligand binding domain, any suitable receptor binding domain, or a combination thereof, which act/acts as a targeting sequence in the fusion protein. A ligand binding domain is a portion of a receptor molecule that specifically binds to a site on a ligand. A receptor binding domain is a portion of a ligand molecule that specifically binds to a site on a receptor. By way of example, tumor necrosis factor alpha is a ligand that binds to and signals via tumor necrosis factor alpha receptor. Thus, for example, a fusion protein comprising a portion of TNFalpha that specifically binds to TNFalpha receptor could be used as a targeting sequence to direct a fusion protein to cells expressing the TNFalpha receptor.

[0438] In aspects, TS(s) may comprise ligands that are, for example, receptor-binding sequences of hormones, growth and/or survival factors, structural proteins, enzymes, cytokines, transport proteins, transmembrane proteins, nuclear proteins, proteins which bind other biomolecules, and/or binding domains derived from these proteins (such as fragments, variants, and variants of fragments thereof that are at least related to a naturally occurring ligand). In AOTI, the targeting domain comprises a sequence that is a ligand for a receptor of a cell of the immune system. In AOTI, the targeting domain is a ligand for a cell of the innate immune system (e.g., a macrophage), the innate trained immune system (e.g., an NK cell or dendritic cell), or the trained/adaptive immune system (e.g., a T cell). Targeting sequences can comprise at least a ligand binding fragment of, e.g., a T lymphocyte immunoreceptor, T cell inhibitory receptor (TCIR), T-cell co-inhibitory molecule, T- cell co-stimulatory molecule, B lymphocyte receptor, DC receptor, NK cell receptor, cytokine receptor, growth factor receptor, chemokine receptor, or tumor cell receptor. Targeting sequences also or alternatively can comprise sequences that effectively bind to a component of a tumor cell, tumor microenvironment, tumor associated growth factor or receptor, tumor associated cytokine or receptor, tumor associated T lymphocyte, T cell co-stimulatory or inhibitory molecule, immune cell, pathogen, or pathogen-associated cell. Specific examples of ligand and receptor sequences that can be used as targeting sequences include, e.g., binding sequences for binding or binding sequences of cytotoxic T lymphocyte associated antigen-4 (CTLA-4, CD 152), Programmed Death-1 protein (PD-1), Programmed death ligand-1 (PD-LI), Programmed death ligand (PD-L2), B7-H3 (CD276), T-cell immunoglobulin and mucin-domain containing-3 (TEVI-3), Carcinoembryonic antigen-related cell adhesion molecule 1 (CEACAM-1), Carcinoembryonic Antigen (CEA), V domain Ig suppressor of T cell activation (VISTA), V-set and immunoglobulin domain containing 8 (VSIG8), B and T lymphocyte attenuator (BTLA), Herpesvirus Entry Mediator (HVEM), CD 160, T cell Ig and ITM domain (TIGIT), CD226, CD96, Lymphocyte activation gene-3 (LAG-3), transforming growth factor β (TGF-β), transforming growth factor β receptor (TGFpR), Receptor Activator of Nuclear Factor κ B (RANK), RANK ligand (RANKL), 4- IBB (CD137), Inducible T-Cell Costimulator (ICOS), OX-40 (CD134), glucocorticoid-induced TNFR-related protein (GITR), CD27, IL6R, IL23R, IL17R, IL-6, IL-23, IL-17,CD39, CD40, CD40L, CD47, CD73,CCR4, CCR5, CXCR4, IL12R, CD4, IL-2R, CD25, CD3, gpl20, NKG2D, Epidermal growth factor receptor (EGFR, EGFR1, ErbB-1, HER1), ErbB-2 (HER2/neu), ErbB-3/HER3, ErbB-4/HER4, Epidermal growth factor (EGF), Transforming growth factor a (TGFa), Vascular endothelial growth factor (VEGF), Vascular endothelial growth factor receptor- 1 (VEGFR-1), VEGFR-2 or VEGFR-3, transforming growth factor β receptor II (TGFpRII), programmed death 1 protein (PD-1), T cell immunoglobulin and mucin domain containing 3 (TEVI-3), B- and T-lymphocyte attenuator (BTLA), CD 160, CD226, T cell Ig and ITM domain (TIGIT), CD96, CD44, Colony stimulating factor 1 receptor (CSF1R), CCR4, Killer-cell immunoglobulin-like receptor (KIR), Vascular endothelial growth factor receptor (VEGFR), Receptor Activator of Nuclear Factor κ B (RANK), V-set and immunoglobulin domain containing 8 (VSIG8), LIGHT (TNFSF14), Leukocyte Associated Immunoglobulin-like Receptor 1 (LAIRI), or V domain Ig suppressor of T cell activation (VISTA).

### 3) Multimeric Fusion Protein Products

[0439] In AOTI, FPs comprise one or more multimerization domains and will be or will ultimately form a multimeric protein after expression. Multimeric fusion proteins will typically exhibit binding preference for other expression products of the constructs of a composition as compared to other endogenous proteins, except in some aspects for targets bound by targeting sequences where the targeting sequence is operable in a single chain expression product. In some aspects, the multimeric protein will be multivalent (comprising two or more binding domains), and possibly multi-specific, binding to two or more different targets, typically with different binding properties (e.g., affinities). In aspects, such a multimeric PPT binds a single type of target or single target. In aspects, such a multimeric PPT is multivalent, comprising at least two domains that contribute to the binding of the single type of target or single target.

[0440] A “multimerization domain” is a sequence/domain that preferentially interacts or associates with another polypeptide molecule or region, directly or indirectly, wherein the interaction of multimerization domains substantially contribute to or efficiently promote multimerization (i.e., the formation of a dimer, trimer, tetramer, or higher order multimers, which may be a homodimer, heterodimer, homotrimer, heterotrimer, homomultimer, heteromultimer, or the like). Multimeric PPT EPs may be multi-specific, if they bind to more than one target (e.g., DEC-205 and HVEM). Multimeric fusion proteins also or alternatively can be multivalent, comprising two, three, four, or more binding domains for one, two, three or more extracellular targets, intracellular targets, or a combination thereof.

[0441] Multimerization may be due to, ia, one or more types of molecular forces, including covalent bonds (e.g., disulfide bonds or bridges), ionic bonds, metallic bonds, electrostatic interactions, salt bridges, dipole-dipole forces, hydrogen bonding, Van der Waals forces, hydrophobic interactions, or any combination thereof. A multimeric FP typically is stable under appropriate conditions (e.g., physiological conditions, in an aqueous solution suitable for expressing, purifying, or storing recombinant or engineered proteins, or under conditions for non-denaturing or non-reducing electrophoresis).

[0442] A multimeric FP can comprise any suitable type of multimerization. Exemplary multimerization domains comprise 1+ disulfide bonds, zinc finger motif, a leucine zipper motif, helix-turn-helix, helix-loop-helix, or CT. In AOTI, a multimeric protein is formed by a ≥1 cysteine-cysteine disulfide bonds.

[0443] Multimerization means the association of at least two multimerization units and more typically three, four, five or six such units via association of a homomultimerizing peptide. In AOTI, multimers comprise at least two initially separate polypeptide chains that form multimers after initial expression. Single chain multimeric peptides also can form through intra-chain domain:domain interactions, such as in some single chain antibody sequence fusion proteins (described above). A multimerization domain can be for example, a dimerizing, a trimerizing, a tetramerizing or a pentamerizing multimerization domain. In AOTI, multimers are connected without any intervening amino acids. In aspects, a multimer comprises a linker sequence, such as a linker sequence of about 1 to about 250, or about 1 to about 100, or about 1 to about 50, about 1 to about 25, about 1 to about 15, about 1 to about 10, or about 1 to about 5 amino acids Linker sequences are described elsewhere herein. Thus, in some cases, the fusion protein is provided that comprises at least two polypeptide chains expressed from constructs of the invention. In some cases, the two PPT chains are covalently linked to one another, e.g., via a disulfide bond. In other instances, the two PPT chains are not covalently linked to one another.

[0444] A multimeric FP typically will comprise at least one suitable multimerization domain. If multiple multimerization domains are present in a fusion protein or fusion protein component, the domains need not be identical to one another. The multimerization domains can function either to effect homomultimerization or heteromultimerization, and can contribute to noncovalent or covalent association of the individual subunits.

[0445] In aspects, a multi-chain, multimeric fusion protein final product is achieved from the expression of an initial single chain fusion protein comprising two or more multimerization domains that lead to multimer formation and at least one cleavage site, such as a 2A cleavage site, which cleavage site can be optionally located in a linker, and which cleavage site ultimately results in the cleavage of the initially expressed polypeptide chain, at some of the fragments of which can assemble into multi-chain, multimeric fusion proteins. As noted by the preceding sentence, in practice not all fusion protein expression products may exhibit the full theoretical potential valency, specificity, or level of multimeric interaction. Thus, for example, a collection of FPs expressed from a NAM composition of the invention can comprise a mixture of monomers, dimers, trimers, and tetramers, etc.

### * Antibody Multimerization Domains

[0446] In AOTI, a fusion protein of the invention comprises one or more antibody multimerization domains. Immunoglobulin molecules naturally are multimeric, multivalent molecules, with disulfide bonds joining each CH1 domain to one CL domain, and CH2 domains to one another. Antibody dimerization domains that can be incorporated into fusion proteins of the invention can be selected from, e.g., an IgE heavy-chain domain 2 (EHD2), an IgM heavy-chain domain 2 (MHD2), an IgG heavy-chain domain 3, an IgA heavy-chain domain 3, an IgD heavy-chain domain 3, an IgE heavy-chain domain 4, an IgM heavy-chain domain 4, an Fc domain, an uteroglobin dimerization domain, and functional variants of any one of the foregoing.

[0447] A number of approaches to developing multimeric proteins from antibody multimerization domains are known in the art which can be applied to generating multimeric fusion proteins of the invention. For example, antibody Fc domains can be multimerised into multivalent forms by engineering the presence of a cysteine residue at position 309 to form multimers (SFE PCT/EP2015/058338), including dimer, trimer, tetramer, pentamer, and higher than pentamer forms. Miller et al. (J. Immunol., 170:4854-4861, 2003) describes tetravalent IgG antibodies and Rossi et al. (Cancer Res., 68:8384-8392, 2008) describes construction of a hexavalent IgG antibody (composed of six Fab and two Fc regions) using the so-called “Dock-and-Lock” method. Similarly, a “knobs and holes” system can be used to generate antibody sequence multimeric proteins (see Xie, et al. 2005 J Immunol Methods 296: 95). Hinge/Cn3 multimerization domains and reference sequences are described in WO 2004/076489, US20130171140 and US20140234316.

[0448] Multimerization through CH2 and CH3 domains of IgG derived proteins is described in, e.g., Soleimanpour et al, 2015, Appl Microbiol Biotechnol). Fab-fragment multimerization approaches are described in, e.g., Mayer et al, 2015, Int J Mol Sci). Several references describe the use of antibody Fc regions to form multimeric proteins. Any suitable one of these methods can be employed to generate multimeric fusion proteins of the invention. Additional principles, compounds, and techniques are described in, e.g., AU2017200515A1, U.S. Pat. No. 9,802,995, US20180362653A1, US20170210802A1, Dal Porto et al., Proc. Natl. Acad. Sci. USA 90:6671-6675 (1993); Greten et al., Proc. Natl. Acad. Sci. USA 95:7568-7573 (1998); Hamad et al., J. Exp. Med. 188:1633-1640 (1998); Schneck et al., U.S. Pat. Nos. 6,015,884, 6,140,113, US20050079170A1, US20140155581A1, US20190276511A1, US20190381184A1, US20180044404A1, EP3027657A1, WO 2008/151088, U.S. Pat. No. 9,212,231, US20200140547A1, and US20130156765A1. Techniques and compositions from these disclosures can also or alternatively be used to develop multimeric antibody FPs and additional examples of multimeric, multivalent, and multi-specific antibody domains and fusion proteins are also DEH.

### ** Non-Immunoglobuin Interaction Domains

[0449] In some aspects, the multimerization (or “interaction”) domains/sequences of a multimeric fusion protein of the invention comprise, primarily comprise, generally consist of, or consist of non-antibody (non-immunoglobulin) domains. Thus, In AOTI, the invention provides constructs that express multimeric fusion proteins that lack any antibody multimerization domains or that even lack any antibody sequences.

[0450] Interaction domains may correspond to or be derived from proteins that dimerize or multimerize, e.g., through non-covalent bonds and/or disulfide bonds, to form the quaternary structure of a protein. In some aspects, the interaction domains of polypeptides expressed from constructs of the invention may be identical, so that homodimers are formed. In other aspects, the interaction domain monomers may be different, resulting in formation of heterodimers. Dimerization motifs from specialized proteins may be used. Exemplary, non-limiting proteins containing dimerization motifs include but are not limited to receptor tyrosine kinases, transcription factors such as leucine zipper motif proteins and nuclear receptors, 14-3-3 proteins, G-protein coupled receptors, kinesin, triosephophateisomerase, alcohol dehydrogenase, Factor XI, Factor XIII, Toll-like receptor, fibrinogen, coil-coil homodimerization motifs such as Geminin, HIV major homology region, S. cerevisiae Sir4p, zinc-finger domains, viral coat proteins, and p53.

[0451] A well-studied type of non-antibody peptide with homodimerizing ability are leucine zipper proteins, which is a common three-dimensional structural motif in several proteins. These motifs are usually found as part of a DNA-binding domain in various transcription factors. A typical single leucine zipper includes multiple leucine residues at approximately 7-residue intervals, which forms an amphipathic alpha helix with a hydrophobic region running along one side. Examples of leucine zipper sequences include SEQ ID NOs:517-526. Another example of such a domain is the leucine zipper domain of AP-1. In some cases, FPs comprise two leucine zipper polypeptides that bind to one another. Use of leucine zipper sequences to form multimeric proteins is KITA.

[0452] FPs can alternatively comprise a dimerization domain of the collectin family (e.g., ACRP30 or ACRP30-like proteins) which contain collagen domains consisting of collagen repeats Gly-Xaa-Xaa. A collagen domain can comprise (Gly-Xaa-Xaa)n, where Xaa is any amino acid, and where n is an integer from 10 to 40. In some cases, a collagen domain comprises (Gly-Xaa-Pro)n, where Xaa is any amino acid and n is an integer from 10 to 40. Such dimerization domains are KITA; SFE US2003/0138440. In aspects, multimerization domains comprise a collagen oligomerization sequence, e.g., SEQ ID NO:527. An exemplary trimerization domain is a human cartilage matrix protein trimerization domain. Other dimerization peptides include coiled-coil domains, such as SEQ ID NOs: 528-532.

[0453] Fibronectin multimerization domains are also KITA and can generate multimeric FPs (SFE US20130079280). Another known peptide with trimerizing ability is tetranectin (e.g., Swis Prot. P05452). TNF superfamily family proteins, such as human TNF (Swiss Prot P01375), human CD40 ligand (P29965), and OX40-L (P23510) are known to form trimers. Recombinant proteins comprising such domains are described in US20190016771. An example of such a TNF multimerization sequence is SEQ ID NO:533.

[0454] Examples of tetramerizing peptides for making tetrameric fusion proteins include tetrabrachion (Stetefeld et al., Naure Struc. Biol. 7:772-776, 2000), modified GCN4 leucine zipper (Harbury et al., Science 262:1401-1407, 1993), and Sendai virus phosphoprotein (Tarbouriech et al., Nature Struc. Biol. 7:777-781, 2000). Pentemeric fusion proteins can comprise multimerization domains from a pentamerizing peptide, for example, Trp- zipper protein (also called Trp-14; Liu et al., Proc. Natl. Acad. Sci. USA 101:16156-16161. 2004), or cartilage oligomeric matrix protein (COMP; Malashkevich et al., Science 274: 761-765, 1996). For forming hexameric fusion proteins, a multimerization domain of a hexamerizing peptide, such as CC-Hex (Zaccai et al., Nature Chem. Biol. 7:935-941, 2011) can be incorporated into the fusion protein. Tetramers can also be formed from multimerization domains of a streptavidin tetramer protein (SFE U.S. Pat. No. 5,635,363). Pentamers can also be formed from by incorporation of a self-assembling coiled-coil domain (SFE US2004209295).

[0455] Additional examples of multimerization proteins from which multimerization domains can be obtained include eukaryotic GNC4 transcription factor motifs; bacterial barnase/barstar module multimerization domains; VLRB protein multimerization domains, such as from lamprey or hagfish, (which can in some cases form octamers or decamers) (SFE US20190016760A1); multimerization domains of a foldon protein; heptamer-forming C4 bp oligomerization domains; and DsRed tetramerization domains (SFE Gross et al., Proc. Natl. Acad. Sci. USA 97:11990-11995 (2000); Wall et al., Nature Structural Biol. 7:1133-1138 (2000), and U.S. Pat. No. 7,202,349).

[0456] Additional examples of multimerization systems are described, for example, in WO2001049866, US2003013844, US20100168390, U.S. Pat. No. 7,482,430, Meier et al., J Mol Biol. (2004) 344(4): 1051-69 & Kabanova et al, PNAS (2014) 111(5): 17965-17970; Jones (Genome Biol. 5:226, 2004); Woolfson (Adv. Protein Chem. 70:79-112, 2005); Parry et al. (J. Struc. Biol. 163:258-69, 2008); Zaccai et al. (Nat. Chem. Biol. 7:935-941, 2011); Ivarsson (FEBS Lett. 586:2638-2647, 2012); WO2019048936; WO2019051094; US20190315817; US20180303931; WO2019086394; WO2018151820; and WO2017074235.

### *** “Trap” Multimeric Fusion Proteins

[0457] Another class of multimeric proteins are “trap” proteins. A “trap” in TD refers to an (1) expression product that (2) binds and detectably or significantly modulates the biological activity of a single target molecule (e.g., through target-mediated cellular uptake of the fusion protein, downstream signaling, and the like), which target molecule typically is an extracellular molecule, such as a cell receptor (e.g., an immune cell receptor), (3) comprises two or more identical or substantially identical (typically identical) polypeptide chains, each of which chain contains (a) a target binding sequence, (b) an optional but typically present flexible linker, and (c) a multimerization domain that is smaller than a full antibody multimerization domain, subject to less processing than a full antibody multimerization domain, or both, and which typically lacks any antibody multimerization sequences. For example, trap proteins lack Fc portions and do not exhibit effector functions. Compared to full-length Abs, trap proteins typically exhibit detectably better penetration of cells & microenvironments (cells & surrounding milieu material). As a trap protein is composed of identical monomers it is multivalent but monospecific.

[0458] In AOTI, the trap protein comprises a non-antibody sequence multimerization domain. In AOTI, the trap is a trimeric protein comprising a stable trimerization domain. An example of a suitable domain for formation of a trap protein is the trimerization domain from human CMP-1. Incorporation of a CMP-1 multimerization sequence results in a parallel, disulfide-linked, and rod-shaped trimeric structure with high stability following expression. The trap monomers can self-assemble into the final form of the multimeric trap protein in vivo, including in mammals. Other multimerization domains that exhibit similar stability and functioning can alternatively be used to form a trap protein, including variants of CMP-1 multimerization domains.

[0459] The target binding domain of a trap protein can comprise antibody sequences, such as immunoglobulin VH domain, immunoglobulin VL domain, a VH and VL fusion protein, scFv, a PPT derived from a binding and/or framework region of an Ab. The target binding domain also can be a non-immunoglobulin target-binding domain, such as a single domain Ab mimic based on a non-immunoglobulin scaffold (such as an FN domain-based monobody, Z domain-based affibody, DARPINs), singly and in any combination.

[0460] Sequences encoding a variety of multimeric trap proteins are described in this disclosure for incorporation into compositions of the invention. One example of a trap expressed by constructs of the invention is a DEC-205 binding trap, which can be a trimeric trap comprising, e.g., a CMP-1 trimerization domain, such as a murine or human CMP-1 trimerization domain, and anti-DEC-205 antibody receptor epitope binding sequences or DEC-205 ligand sequences, such as keratin sequences discussed elsewhere herein. In aspects, a trap comprising a CI AARS, such as a PD-L1 or PD-1 sequence is expressed from the nucleic acid sequences of a composition.

[0461] Trap proteins exhibit detectably or significantly greater binding for targets than their constituent monomers, enhanced stability as compared to constituent monomers, or both. In AOTI, the trap exhibits at least about 20×, at least about 50×, at least about 100×, at least about 200×, or at least about 500× affinity for the target than its monomeric components. The trap construct does not significantly or detectably enhance the immunogenicity of the fusion protein or impair the functionality of the sequences contained in each chain. Each chain of such a trap can comprise, e.g., one or more antigenic sequences that are taken up by a target cell upon target receptor binding, as well as other components (e.g., one or more intracellular targeting sequences such as one or more PTPSs, ERTPSs, or a combination thereof). Exemplary trap proteins are described in Song W et al. Nat Commun. 2018; 9(1):2237. doi:10.1038/s41467-018-04605-x.

[0462] Trap proteins that modulate targets can be classified as inhibitory traps or stimulatory traps. Inhibitory traps for macromolecule targets include traps that can be protein molecules that specifically bind and further inhibit or block the biological functions of a target of interest, such as an interleukin, TNF-alpha (and TNF-alpha receptor), TGF-beta (and TGF-beta receptor), CSF-1 (and CSF-1 receptor), CXCR proteins and ligands, CCR proteins and ligands, ACKR3 and its ligands (CCL11, CCL12), ACKR6 and its ligand (CCL18), CTLA-4, PD-1, PD-L1, PD-L2, B7-H3 (CD276), B7-H4 (VTCN1), HVEM (CD270 or TNFRSFi4), BTLA (CD272), TIM-3, GALS, TIGIT, A2aR, LAG-3, KIRs and MHC class I or II. Traps can also be stimulatory, including those that agonistically act on immune checkpoint targets such as CD28, ICOS (CD278), 4-1BB (CD137 or TNFRSF9), OX40 (CD134 or TNFRSF4), GITR (CD357 or TNFRSFi8), CD27 (TNFRSF7), and CD40 (TNFRSF5) or that mimic the agonistic effects of the ligands of the above receptors, including but not limited to B7.1 (CD80), B7.2 (CD86), B7-H5 (VISTA or Gi24), ICOSL (B7H2 or CD275), 4-1BBL (CD137L), OX40L (CD252), GITRL, CD27L (CD70), and CD40L (CD154). Targets for agonistic traps also include some toll-like receptors, including TLR4, TLR7, TLR8, & TLR9. Such trap proteins are described in US20190381184.

[0463] In AOTI, the invention provides fusion proteins comprising a trap protein in which one or more antigens, such as two or more antigens, such as three or more antigens, are inserted within a multimerization domain, such as a trimerization domain (and constructs encoding such fusion proteins). In AOTI, such antigens are bound to each other, the parts of the associated multimerization, or both, by linker sequences, such as those described elsewhere herein. In AOTI, some, most, generally all, or all of such antigen sequences are associated with one or more intracellular targeting sequences, such as one or more PTPSs. Such FPs can target a DCR, such as DEC-205, and comprise a multimerization domain, e.g., a CMP-1 multimerization domain.

### b. Intracellular Targets and Targeting Sequences

[0464] TS(s) can target one or more intracellular targets, such as an organelle-associated target or a target that is an intracellularly expressed polypeptide or other biomolecule. Examples of such ITS(s) are described in detail here, but also may be referred to in other portions of this disclosure.

[0465] In one exemplary aspect, a fusion protein comprises one or more phagosome targeting sequences. In one such aspect, the inclusion of the phagosome targeting sequence results in enhanced antigen-specific immune responses to one or more antigens included in the fusion protein or co-expressed with the phagosome-targeting sequence fusion protein. Phagosome targeting sequences have been described in the art (SFE Pereira M P et al. ACS Infect Dis. 2015; 1(12):586-592. doi:10.1021/acsinfecdis.5b00099) and include cathepsin fragments, γ-Secretase-targeting sequences (or sequences targeting related peptides CD44 or LRP), Rab39-binding sequences, and the like. Relevant principles and techniques are also discussed in, e.g., Pauwels A M, et al. Trends Immunol. 2017; 38(6):407-422. doi:10.1016/j.it.2017.03.006.

[0466] An intracellular targeting/localization and processing sequence also or alternatively can be a sequence that enables an associated fusion protein to avoid, disrupt, or overcome processing by one or more organelles. For example, a fusion protein of the invention can comprise one or more lysosomal or phagosomal avoidance/disruption sequences. Such sequences can be obtained from adenovirus penton proteins, influenza virus HA-2, and the like (SFE US20020155609A1; Bal et al., Eur J Biochem 267:6074-81 (2000); and Wagner, et al., Proc. Natl. Acad. Sci. USA, 89:7934-7938, 1992). In aspects, a fusion protein also or alternatively comprises a sequence targeting an exosome. Examples of exosome targeting sequences, e.g., the N terminus of lysosomal associated membrane protein 2b (Lamp2b), are also known in the art (SFE Hung M E et al. J Biol Chem. 2015; 290(13):8166-8172. doi:10.1074/jbc.M114.621383 and Tian Y et al. Biomaterials. 2014; 35(7):2383-2390. doi:10.1016/j.biomaterials.2013.11.083) and the C1C2 domain from MFG-E8. Additional exosome TSs that may be useful in the context of such FPs are described in, e.g., WO2020081786 and WO2015002956.

[0467] In AOTI, a fusion protein expressed by a construct of the invention also or alternatively comprises an intracellular TS, extracellular TS, or both, which detectably or significantly promotes processing of the fusion protein by early endosomes (e.g., by incorporation of CD40-specific monoclonal antibody sequences). In AOTI, a composition of the invention also or alternatively comprises an intracellular TS, extracellular TS, or both, which detectably or significantly targets late endosomes, early lysosomes, or both (e.g., a DEC205-specific sequence). In AOTI, a composition of the invention comprises sequences encoding both types of such fusion proteins. In AOTI, such different fusion proteins are encoded by sequences on different NAMs. In AOTI, a method is provided in which such different NAMs are administered in association with each other (e.g., in a sequential administration method). In AOTI, one of such types of fusion proteins comprises one or more gD sequences, one or more antigens, or both, or both of such types of fusion proteins comprise one or more gD sequences, antigenic sequences, or both.

### 1) Proteasome Targeting/Processing Sequences (PTPSs)

[0468] In AOTI, the constructs of the invention encode and fusion proteins encoded by such constructs comprise one or more proteasome targeting/processing sequences (“PTPSs”). Numerous suitable proteasome targeting/processing sequences are KITA and, in general, any suitable number of any suitable type of PTPSs can be incorporated into EPs.

[0469] A PTPS can target any suitable type of proteasome or two or more types of proteasomes (e.g., a classical proteasome, an immunoproteasome, or a thymo-proteasome) (SFE Rock KL. Trends Immunol. 2016; 37(11):724-737. doi:10.1016/j.it.2016.08.010 and Sijts E J et al. Cell Mol Life Sci. 2011; 68(9):1491-1502. doi:10.1007/s00018-011-0657-y) and any suitable portion/assembly/aspect of a proteasome or proteasomal system (e.g., a 26S proteasome, 20S proteasome/chamber, a 30S proteasome, or hybrid proteasome, or further subunits such as a base subcomplex, a 19S core, or an RP complex) (SFE Tanaka K. Proc Jpn Acad Ser B Phys Biol Sci. 2009; 85(1):12-36. doi:10.2183/pjab.85.12, with respect to the biology and composition of proteasomes). In AOTI, FPs comprise PTPS(s) that target an immunoproteasome (optionally in combination with a standard proteasome targeted by the same PTPS or another PTPS contained in the fusion protein). In an exemplary aspect, at least one PTPS of a fusion protein binds to one or more subunits of an immunoproteasome, such as p1i, P2i, or P5i. In aspects, at least one PTPS of a fusion protein also or alternatively detectably or significantly binds to a thymo-proteasome or a subunit thereof (e.g., p1i, P2i, or P5t).

[0470] In AOTI, a fusion protein or polypeptide of the invention comprises a proteasome targeting chaperon sequence. One example of such a type of sequence is a calreticulin sequence. Calreticulin peptides and sequences are described in, e.g., U.S. Pat. No. 9,085,638 and the use of such sequences for proteasome targeting is discussed in, e.g., US Patent Publication 20190177733. Calreticulin sequences also can in some contexts and aspects also or alternatively promote DC uptake of fusion proteins, MHC I molecule association of antigens, induces immune cell cytokine production, promotes TH cell activity, and provides an “eat me” signal to DCs and other innate trained immunity cells and innate immunity cells. SFE Cheng W F, et al. J Clin Invest 2001; 108:669-678; Gardai et al. Cell 123: 321-334, 2005). As such, constructs comprising one or more calreticulin-encoding sequences, such as a functional fragment of a naturally occurring calreticulin or a functional variant of a naturally occurring calreticulin that is at least highly related or substantially identical to a wild-type calreticulin, are another aspect of the invention. In AOTI, such a construct further comprises ≥1 other types of PTPSs, e.g., 1+ ubiquitin sequences.

[0471] In aspects, a PTPS is a proteolytic signal or motif that targets an associated polypeptide for processing in the proteasome. Accordingly, fusion proteins of the invention can comprise one or more of such PTPSs or one or more of such PTPSs in combination with other PTPSs, such as a ubiquitin sequence. One such motif, the PEST sequence, is found extensively in short-lived proteins (Rogers et al Science. 234(4774):364-8 1986). A PEST sequence is a peptide sequence that is rich in proline (P), glutamic acid (E), serine (S), and threonine (T). This sequence is associated with proteins that have a short intracellular half-life. For example, Mouse Ornithine DeCarboxylase (MODC) is one of the shortest half-lived proteins in mammals due to the inclusion of PEST sequences in its carboxy terminus (Loetscher et al. J Biol. Chem. 1991 Jun. 15; 266(17):11213-20; Ghoda et a\Mol Cell Biol. 1992 ay; 12(5):2178-85). Proteomics). Predicted PEST sequences have been identified in well-known antigens including E1A (residues 44 to 49, 125-149, 177-202, 223-244), c-myc (10-51, 52-65, 83-126, 168-206, 206-241, 241-269, 276-287), p53 (39-62, 62-98, 213-232), c-Fos (31-91, 128-139, 205-250, 265-279, 307-358, 360-380),v-Myb (4-16, 174-186), p730 (323-361), HSP70 (33-46, 125-152, 424-445), HMG-CoA reductase (381-395, 429-442, 442-456), TAT (382-395), alpha- casein (58-79, 151-193), beta-casein (−1-25, 113-134) (Rogers et al. Science, 1986. vol. 234 pp 364-368). SFE Rogers S, Wells R, Rechsteiner M. Amino acid sequences common to rapidly degraded proteins: the PEST hypothesis. Science. 1986; 234(4774):364-368. doi:10.1126/science.2876518 and WO2004066935. Known PEST sequences include, e.g., SEQ ID NO:534. Additional PEST sequences and related PMCs are described in Doody K M et al. Cell Res. 2014; 24(9):1027-1028. doi:10.1038/cr.2014.100; Belizario J E et al. Curr Protein Pept Sci. 2008; 9(3):210-220. doi:10.2174/138920308784534023; and Joshi S N et al. MAbs. 2012; 4(6):686-693. doi:10.4161/mabs.21696. PEST motifs are also classified as “degrons,” which are DFEH.

[0472] In AOTI, a fusion protein of the invention can also or alternatively comprise one or more proteasomal cleavage sites (sites that are cleaved by proteasomal processing at detectable or significant levels). Such sites and the identification of such sites are described in, e.g., Liu T et al. Cell Mol Immunol. 2009; 6(2):135-142. doi:10.1038/cmi.2009.19.

[0473] In aspects, FPs can comprise ≥1 PTPS(s) that comprise sequences from or that are highly similar to one or more “ubiquitin like proteins” Numerous ubiquitin-like proteins are KITA and further examples of such proteins are DEH. An example of such a protein is FAT10. FAT10 FPs are rapidly degraded by the proteasome at potencies/speeds comparable with ubiquitin. SFE Mark Steffen et al. Molecular and Cellular Biology April 2005, 25 (9) 3483-3491; DOI: 10.1128/MCB.25.9.3483-3491.2005.

[0474] In some aspects, a fusion protein comprising a PTPS also will comprise one or more protease cleavage site recognized by proteases that may be present in the expression environment. In AOTI, such cleavage sites are cleavage sites recognized by a metalloprotease (MMP), a sequence recognized by urokinase uPA, or a sequence recognized by furin, or the fusion protein comprises a combination of such cleavage sites.

[0475] In AOTI, inclusion of one or more PTPSs in EPs detectably or significantly enhances proteasomal processing of the associated FP. In AOTI, the inclusion of 1+ PTPSs in FPs AOA DOS enhances one or more aspects of immune response associated with the administration and expression of the construct, such as one or more MHC I or MHC II responses.

### (a) Ubiquitin and UBL PTPSs

[0476] In AOTI, PTPSs of FP(s) comprise, PC, GCO, or consist of 1+ ubiquitin sequences. FPs can comprise any suitable number of ubiquitin sequences. In AOTI, the fusion protein comprises only a single ubiquitin sequence. In AOTI, the fusion protein comprises only one PTPS. In one aspect a fusion protein comprises only one PTPS and that one PTPS is a ubiquitin (Ub) sequence. In AOTI, PTPS(s) comprise polyubiquitin sequence(s).

[0477] In AOTI, the PTPS comprises a Ub sequence that comprises both a recognition element and a Ub attachment site. In natural systems, polyubiquitin (polyUb) chains are created by adding Ubs to a single Ub (at a UB attachment site) attached to a target protein (via a Ub attachment site). PolyUb chains consisting of Lys48-Gly76-linked subunits are the principal signal for proteasome-mediated proteolysis. Chains of four or more Ubs are believed to be capable to bind to the 19S regulatory subunits of 26S proteasomes with sufficient avidity to enable the 19S subunit to unfold the attached substrate and thread it into the interior of 20S proteasomes, where the substrate is cleaved into oligopeptides. Thus, In AOTI, the invention provides fusion proteins and related constructs comprising four or more Ubs, such as five or more Ubs, six or more Ubs, or seven or more Ubs. In aspects, however, the invention alternatively provides fusion proteins comprising less than four full Ubs, but which still exhibit detectable or significant proteasomal targeting and other polyUb functionalities. Thus, In AOTI, the invention provides fusion proteins comprising three or more Ubs, and in another aspect the invention provides fusion proteins comprising less than 4 Ubs, such as 2-3 Ubs. In AOTI, CEPESCs encode FPs comprising 1+ partial Ubs that still impart polyUb functionality when combined with other Ubs. E.g., FPs can comprise 1, 2, or 3 partial Ubs in combination with 2, 3, 4, or 5 Ubs, such as 1 partial Ub in combination with 3 complete, generally complete, or essentially complete Ubs.

[0478] Cleaved peptides disassociated from polyUbs in normal cellular functions are believed to be the principal source of peptides for class I molecules of the major histocompatibility complex. As such, In AOTI, the inclusion of a polyUb sequence to a fusion protein of the invention results in a detectable or significant increase in MHC I-mediated activity with respect to one or more antigens of the fusion protein.

[0479] In AOTI, one, most, generally all or all of the Ub sequences of a fusion protein are positioned at or near the N-terminus of the fusion protein (e.g., in the first 10%, first 20%, or first 25% of the amino acid sequence). In aspects, one or more Ub sequences are positioned in the middle of the fusion protein. In AOTI, a fusion protein is provided that lacks any Ub sequences in the C-terminal ⅓^{rd}, ¼^{th}, or ⅕^{th} of the fusion protein, or lacks any Ub sequence at the very C-terminus of the fusion protein. However, in some aspects a fusion protein will comprise one or more Ub sequences in such a C-terminal portion of the fusion protein. In some aspects, such C-terminal Ub sequences are metabolically stable and not cleaved from the fusion protein. In AOTI, such metabolically stable Ub sequences are still able to detectably if not significantly induce proteasomal degradation of some, most, generally all, or all of the amino acid sequence(s) associated with the Ub sequence.

[0480] In AOTI, the PTPS, such as Ub(s) exhibit the ability to DOS enhance CD8+ responses against one or more antigens associated with the Ub in a fusion protein, such as a Ub:gD:antigen fusion protein, Ub:gD:antigen gD fusion protein, or a Ub:gD:antigen:Ub:antigen:gD:antigen fusion protein. In AOTI, such a fusion protein comprises one or more subdominant epitopes or a composition comprises a separate nucleotide sequence encoding a Ub:subdominant epitope fusion protein that is expressed independently but in association with expression of a gD:antigen fusion protein and the presence of the Ub detectably or significantly enhances one or more immune responses to the subdominant epitope, such as a CD8+ response.

[0481] In AOTI, the Ub sequence is cleaved from the fusion protein. In AOTI, the Ub sequence acts as a cleavage site, creating two polypeptides, the Ub-associated polypeptide and a second polypeptide. In this respect, some polypeptides comprising Ub sequences can act as multi-cistronic, e.g., bicistronic constructs, which are discussed in more detail above. Such applications are exemplified in US20150266945.

[0482] In one aspect the Ub contained in a fusion protein encoded by a construct of the invention is or comprises a K48 chain Ub. In one aspect such constructs and fusion proteins are associated with detectably or significantly enhanced levels of proteasomal targeting of the fusion protein, fusion protein degradation, MHC antigen presentation, or a combination of any or all thereof. In AOTI, the fusion protein also or alternatively comprises or consists of one or more K63-linked Ubs. In such aspects, the fusion protein or construct is detectably or significantly associated with detectably or significantly enhanced DNA repair, ribobomal biogenesis, degradation of the fusion protein, or a combination thereof. In AOTI, the fusion protein comprises both a K63-linked Ub and a K48-linked Ub and the fusion protein is associated with a detectable enhancement in fusion protein degradation as compared to a fusion protein comprising either one type of Ub on its own.

[0483] In AOTI, one or more Ub sequences contains seven lysine residues that can serve as substrates for ubiquitination, enabling the generation of seven different inter-ubiquitin linkage types. In AOTI, the Ub comprises an amino-terminal methionine (M1) that can act as a Ub acceptor site. In AOTI, however, the Ub or polyUb of the fusion protein lacks an N-terminal Met residue. It will be understood that the discussion of the characteristics of Ub sequences herein can be applied to polyUb fusion proteins and, as such, the disclosure of any aspect with reference to a Ub sequence of any type or characteristic will be understood as providing implicit support for polyUb sequences comprising one or more Ubs of such type or having such characteristics. PolyUbs encoded by a fusion protein, formed by further ubiquitination of expressed fusion protein Ub sequences, or both, can exhibit any suitable PolyUb form. In AOTI, the fusion protein encodes a linear polyUb form or a branched polyUb; forms a linear polyUb or branched polyUb, or both. Various forms of polyUb are discussed in, e.g., Rieser E et al. Trends Biochem Sci. 2013; 38(2):94-102. doi:10.1016/j.tibs.2012.11.007

[0484] In AOTI, FPs comprising 1+ Ubs that are modified to enhance stability of the Ub sequence and are associated with reduced cleavage of the Ub sequence. One example of such a Ub sequence is Ub-G76A, featuring a Gly76 to Ala76 mutation of the last residue of a typical Ub sequence. In aspects, G76 is substituted with another non-polar amino acid residue, such as I, L, or V.

[0485] In AOTI, the fusion protein comprises only PTPS or ERTPS targeting sequences. In AOTI, the fusion protein lacks any lysosomal targeting sequences (e.g., SEQ ID NO:514). In other aspects, the fusion protein will comprise one or more lysosomal targeting sequences in addition to one or more PTPSs, and optionally also one or more ERTPSs.

[0486] The Ub sequence(s) incorporated from the fusion protein can be of any suitable source or composition. In AOTI, Ub sequence(s) are from the species that is the primary target for the CEPESC. Thus, for example, the Ub sequence(s) can be, e.g., pig, cow, horse, dog, cat, or human Ubs, functional fragments thereof, polyUbs that are a mixture thereof, and can comprise functional variants thereof which are, e.g., highly related or substantially identical to one or more naturally occurring Ub sequences or functional fragments thereof. In AOTI, the Ub sequences are from a naturally occurring Ub, a functional fragment thereof, or both, as in the case of a polyUb comprising complete and partial naturally occurring Ubs.

[0487] A ubiquitin sequence can correspond to any type of naturally occurring Ub sequence or a functional fragment or variant thereof. In many organisms, ubiquitin is encoded by 4 different genes. For example, the UBA52 and RPS27A genes code for a single copy of ubiquitin fused to the ribosomal proteins L40 and S27a, respectively, whereas the UBB and UBC genes code for polyubiquitin precursors (polyUb and polyUC) with exact head to tail repeats, the number of repeats differ between species and strains.

[0488] In AOTI, the fusion protein comprises at least one Ub that also or alternatively is a Ub or Uc precursor sequence, such as a polyubiquitin B sequence (which comprises three direct repeats of a typical ubiquitin coding sequence with no spacer sequence). An example of such a ubiquitin B polyUb is SEQ ID NO:1, GenBank Accession No. AAA31133.1.

[0489] A Ub or polyUb can be placed in any suitable orientation in the fusion protein. In AOTI, a Ub, such as a polyUb, is placed downstream of one gD sequence and upstream of a second gD sequence, such as a first gD sequence that is an N-terminal gD sequence fragment or variant and a second gD sequence that is a C-terminal gD fragment or variant or two partial or complete gD sequences that overlap in terms of structure/composition. In one such case, the Ub sequence may be placed indirectly or directly adjacent to one or more antigenic sequences that are also positioned between the gD sequences (e.g., a sequence according to the structure gD1-antigen-Ub-gD2). In another example, a fusion protein can comprise two Ub sequences, such as polyUb sequences, positioned between gD sequences with an intervening antigenic sequence (e.g., according to the structure gD1-antigen-Ub1-antigen-Ub2-gD2). In yet another aspect, the invention provides gD:antigen fusion proteins according to the formula Ub1-antigen(x)-Ub2-gD (antigen(x) signifying that the region can contain two or more antigens, such as 2-10, 3-12, 4-12, 3-9, 4-8, or 2-6 antigens). Another type of fusion protein comprises a sequence according to the formula gD1-Ub-antigen(x)1-Ub2-antigen(x)2-gD2. Still another fusion protein type comprises a sequence according to the formula Ub-antigen(x)-Ub2-antigen(x)2-gD (e.g., where the C-terminal gD primarily consists of or generally consists of a gD profusion domain). Still another example of a fusion protein of the invention is a trap protein, such as PDL1 trap (discussed further below) in combination with Ub, antigenic, and gD sequences, such as a sequence according to the formula PDL1trap-Ub1-antigen(x)-Ub2-gD (other trap proteins, such as a DEC-205 trap, could be used in place of the PDL1trap in such a fusion protein). In any of these fusion proteins, one, two, three, four, or more spacer sequences can be introduced between the Ub sequences and other sequences, between the antigenic sequences, or in any other suitable position.

[0490] In AOTI, Ub sequences of a fusion protein are modified so as to remove one, some, most, generally all, or all of any potential glycosylation sites in the Ub sequence, such as by introducing one or more N-to-D substitutions in the Ub sequence, as DEH with respect to certain antigenic sequence variants.

[0491] Ubiquitin conjugated fusion proteins are KITA and sequences from such ubiquitin FPs can be ATAOTI. Ubiquitin-fused genetic vaccines that enhance both antigen degradation and immune presentation ATAOTI are described in, e.g., M. A. Barry et al, Nature, 377 (1995), pp. 632-635; T. W. Tobery, et al. J. Exp. Med, 185 (1997), pp. 909-920; F. Rodriguez et al. J. Virol, 71 (1997), pp. 8497-8503; G. Delogu et al. Infect. Immun, 68 (2000), pp. 3097-3102. Additional PMCs related to Ub sequences, proteasomes, and the like are described in Li W et al. Cell Mol Life Sci. 2008; 65(15):2397-2406. doi:10.1007/s00018-008-8090-6; Yasushi Saeki et al. The Journal of Biochemistry, Volume 161, Issue 2, Pages 113-124, https://doi.org/10.1093/jb/mvwO911US Patents 6319503 & 8858951; R6th S, et al. Cell Mol Life Sci. 2019; 76(14):2761-2777. doi:10.1007/s00018-019-03112-6; Trauth et al., ACS Omega 2019, 4, 2, 2766-2778, Feb. 6, 2019, https://doi.org/10.1021/acsomega.8b03011; and Nathan J A et al. EMBO J. 2013; 32(4):552-565. doi:10.1038/emboj.2012.354. Still additional related PMCs are described in US 20090221682; US20040170643; U.S. Pat. No. 9,079,966; Dutton J L, et al. PLoS One. 2013; 8(10):e76407. doi:10.1371/journal.pone.0076407; Chen J H, et al. Hepat Mon. 2011; 11(8):620-628. doi:10.5812/kowsar.1735143×.689; and Wong S B et al. J Immunol. 2004; 173(5):3073-3083. doi:10.4049/jimmunol.173.5.3073.

[0492] In aspects, FPs comprise one or more ubiquitin-like (UbL or UBL) sequences, which either correspond to naturally occurring ubiquitin-like proteins, comprise functional fragments of such proteins, or comprise a functional variant of such a protein or fragment, such as a variant that is very related or substantially identical to such a wild-type UbL protein (UBLP). In this disclosure a UBLP means any member of the UBL family of proteins that is not a ubiquitin. Members of the UBL family are small, non-enzymatic proteins that share a common structure exemplified by ubiquitin, which has 76 amino acid residues arranged into a “beta-grasp” protein fold consisting of a five-strand antiparallel beta sheet surrounding an alpha helix. The beta-grasp fold is widely distributed in other proteins of both eukaryotic and prokaryotic origin. Collectively, ubiquitin and ubiquitin-like proteins are referred to as “ubiquitons.”

[0493] In AOTI, FPs comprise UBL sequence(s) capable of conjugation (sometimes known as Type I UBL). Examples of UBLs that exhibit such properties include SUMO, NEDD8, ATG8, ATG12, URM1, UFM1, FAT10, and ISG15 UBLs. In aspects, the fusion protein comprises a UBL that does not exhibit covalent conjugation (a Type II UBL). Another example of a UBLP is a Rad23 protein (e.g., human Rad23b), examples of which are KITA (Goh A M et al. BMC Biochem. 2008; 9:4. Published 2008 Jan. 30. doi:10.1186/1471-2091-9-4 and Liang R Y et al. J Mol Biol. 2014; 426(24):4049-4060. doi:10.1016/j.jmb.2014.10.004). Still another example of a UBL is NEDD8 and its counterpart NUB1, which works by recruiting NEDD8 and its conjugates to the proteasome for degradation. Sequences according to the formula A(X4)L(X10)L(X3)L are conserved in these NEDD8-binding sites among human and other mammals and can be incorporated into FPs to promote proteasomal processing/targeting. SFE Tanaka T et al. J Biol Chem. 2003; 278(35):32905-32913. doi:10.1074/jbc.M212057200.

[0494] In AOTI, the fusion protein comprises a UBL sequence that can also or alternatively be characterized as a functional sequence of a ubiquitin-like modifier (ULM) UBLP or a functional variant thereof. In aspects, the fusion protein comprises a functional sequence of a ubiquitin-like domain protein (UDP) or a functional variant thereof. Ubiquitin-like modifiers are attached to proteins reversibly and post-translationally, like ubiquitin. Ubiquitin-like domain proteins are larger than ubiquitin and typically contain multiple domains, with only one homologous to ubiquitin. In AOTI, the fusion protein comprises a UBL sequence or ubiquitin sequence that detectably binds the proteasome.

### (b) Degrons and Ub-Targeting Sequences

[0495] In AOTI, a fusion protein of the invention, such as a gD:antigen fusion protein, also or alternatively comprises one or more degrons. In AOTI, the one or more degrons of the fusion protein detectably enhance the targeting of the fusion protein to the proteasome, processing of the fusion protein by the proteasome, or both. In AOTI, the fusion protein comprises one or more UBL sequences or ubiquitin sequences and one or more degrons.

[0496] A “degron” (degradation sequence) typically is a small, “portable” sequence that contains the minimal element in a PPT sufficient for recognition and degradation by a proteolytic apparatus. A degron also typically is a portion of a protein that is important in regulation of protein degradation rates.

[0497] FPs can comprise one, two, or more degrons. The degrons can be any suitable type of degrons. In AOTI, the one or more degrons detectably or significantly enhances degradation of the fusion protein. In the case of proteasomal degradation, a specific degron might initiate polyubiquitylation by an E3 ligase or might target the substrate directly to the proteasome. Either such type of degron or both types can be incorporated into FPs OTI.

[0498] In AOTI, the invention provides fusion proteins comprising one or more degrons composed of 6 to 10 amino acids. In AOTI, one, most, generally all or all of the degrons of a fusion protein are located within flexible regions of the fusion protein, enabling interaction with other proteins (e.g., ubiquitin, E3 ubiquitin ligase, etc.). Thus, a degron, in some aspects, can be associated with flexible flanking sequences, such as one of the flexible linkers described elsewhere herein. In aspects, FPs comprise one or more degrons that comprise one or more Lys or Arg residues that are structurally exposed.

[0499] In AOTI, FPs comprise one or more degrons that are “Ubiquitin-dependent.” In AOTI, the fusion protein also or alternatively comprises one or more degrons that can be characterized as “Ubiquitin-independent.” In the first case intracellular protein degradation is mediated largely by the ubiquitin (Ub)-proteasome system (UPS) and in the second case by autophagy-lysosome pathways, with molecular chaperones being a part of both systems.

[0500] In AOTI, a fusion protein of the invention comprises an N-degron, a C-degron, or a combination thereof. N-degrons and C-degrons are degradation signals whose main determinants are, respectively, the N-terminal and C-terminal residues of cellular proteins. N-degrons and C-degrons include, to varying extents, adjoining sequence motifs, and typically also internal lysine residues that function as polyubiquitylation sites.

[0501] The UPS comprises a set of pathways that have in common two classes of enzymes: E3-E2 Ub ligases and deubiquitylases (DUBs). A Ub ligase recognizes a substrate protein through its degradation signal (degron)

[0502] Degrons can AOA further be generally divided into two major groups, based on the characteristics of the signal that triggers degradation. Inherent degrons, permanently present in proteins and acquired degrons that are induced by post translational modifications (PTMs). Inherent degrons can be specific amino acid sequences, such as the destruction box of cyclins, or N- and C-terminal amino acids corresponding to the N-degron and the C-degron pathways mentioned above. In addition, a large portion of inherent degrons consists of hydrophobic sequences, normally buried in the protein core, or within interaction surfaces between subunits of protein complexes. These degrons are frequently exposed when proteins fail to fold properly, upon protein misfolding or when protein complexes fail to assemble. The exposure of hindered degrons can be induced by multiple mechanisms, including changes in the environmental or intracellular conditions as well as by genomic mutations. These perturbations initiate a protein quality control (PQC) response that either assists misfolded protein re-folding or triggers elimination by the UPS.

[0503] Unlike inherent degrons, acquired degrons are transient elements obtained via PTMs, such as phosphorylation, ligation of Small Ubiquitin-like Modifier (SUMOylation) and hydroxylation. Protein phosphorylation is by far the most common PTM that triggers ubiquitylation via E3 Ub ligases.

[0504] A degron that leads to the degradation of a folded protein typically has two parts. Most proteins appear to be targeted for degradation by the covalent attachment of a tag that consists of several copies of the small protein ubiquitin. However, ubiquitinated proteins are stable, at least in vitro, unless they also contain an unstructured region, which is then the second component of the degron. In AOTI, the invention provides fusion proteins in which both components are contained in one or more degrons on a single chain of a polypeptide. In aspects, the invention provides fusion proteins wherein one or more of such elements is on one chain and the other on or at least also on a second chain of a multimeric protein, such as a multimeric trap fusion protein of the invention. As noted, In AOTI, a degron-containing fusion protein of the invention will typically comprise at least one ubiquitin target sequence/site. However, In aspects, the invention provides fusion proteins comprising one or more unstructured regions that lack ubiquitination sites, which detectably or significantly promotes proteasome targeting, protein degradation, or both (SFE Schrader E K et al. Nat Chem Biol. 2009 December; 5(12):954]. doi:10.1038/nchembio.250). Additional relevant disclosures are provided in Mesz6ros et al. Science Signaling14 Mar. 2017 Vol. 10, Issue 470, DOI: 10.1126/scisignal.aak9982; Alexander Varshavsky, PNAS. January 2019, 116 (2) 358-366; DOI: 10.1073/pnas.1816596116; and Greussing R et al. J Vis Exp. 2012; (69):3327. Published 2012 Nov. 10. doi:10.3791/3327.

[0505] In AOTI, FPs comprise one or more D box degrons, KEN box degrons, ABBA degrons, or a combination thereof.

[0506] D box degrons follow the consensus R[KR][AP]Lx[DE][ILV][TS]N. Such a peptide would likely have a relatively high binding affinity. In AOTI, the +6 position of such a sequence if phosphorylated in the D box degron of the fusion protein. Examples of D box degrons include SEQ ID NOs: 535-567.

[0507] In aspects, FPs AOA comprises one or more KEN box degrons. KEN box degrons are named because they contain the characteristic K-E-N motif (however, in some cases such degrons contain a GxEN motif). Examples of such degrons which can be included in FPs include SEQ ID NOs:568-589.

[0508] In aspects, FPs AOA comprises 1+ ABBA degrons. ABBA degrons typically comprise a structure according to the formula [ILMVP][FHY]x[DE], [FILV]x[ILMVP][FHY]x[DE], or [KR]xx[ILV][FHY]x[DE]. A lysine in the floor of the ABBA binding pocket conserved across all characterized ABBA binding domains (human Cdc20, yeast Cdh1 and yeast Cdc20) is a serine in human Cdh1 and the portion of blade contacting the conserved lysine, conserved in human Cdc20, yeast Cdh1 and yeast Cdc20, has diverged significantly in Cdh1. Examples of ABBA degrons that can be in FPs include SEQ ID NOs:590-594.

[0509] Other types and examples of degrons suitable for inclusion in FPs are KITA and include, e.g., LLRL tail degrons, IR tail degrons, etc., such as SEQ ID NOs:595-597. Another example of an amino acid sequence degron is the Cop1-binding Trib peptide (SFE WO2019118893).

[0510] FPs can also comprise other sequences that target FPs for ubiquitination. Identification of ubiquitin sites that can be incorporated into fusion proteins of the invention is discussed in, e.g., Nguyen, V et al. BMC Bioinformatics 16, S1 (2015) doi:10.1186/1471-2105-16-S1-S1. In aspects, FPs comprise or a composition can comprise a nucleotide sequence encoding an E3 ligase ligand, which can promote or enhance polyubiquitination, or an E3 ligase variant, or a fusion protein comprising such an E3 ligase sequence. Proteolysis-targeting chimeras (PROTACs) comprising E3 ligase sequences have been developed that can be used in compositions of the invention or sequences therefrom incorporated into expression products of the invention (SFE Qi J, Zhang G. Future Med Chem. 2019; 11(7):723-741. doi:10.4155/fmc-2018-0557, for a discussion of PROTACs). Other Ub-targeting sequences are described in Adams, Trends Mol Med. 2002; 8(4 Suppl):S49-54).

[0511] In AOTI, FPs comprise 1+ degradons. A degradon is a sequence comprising a target binding domain and a proteasome-binding domain (e.g., a Ub or ULP domain). A degradon can comprise from N-terminus to C-terminus (a) the target binding domain and (b) proteasome binding domain or from N-terminus to C-terminus (a) proteasome binding domain and (b) the target binding domain. Optionally, the degradon can comprise a linker sequence positioned between the target binding domain and proteasome binding domain. Degradons are described in WO2017079723 and US20050152888.

[0512] In AOTI FPs comprise an E3 ligase e.g., CHIP (carboxyl terminus of Hsc70-interacting protein), 1+ cytosolic chaperons (e.g., Hsp70/Hsp90), or CT.

[0513] As noted, in some aspects fusion proteins comprise both one or more degrons and one or more Ubs or UBLP sequences. Examples of fusion protein sequences comprising both degrons and Ubs/UBLP sequences are described in, e.g., Inobe T, et al. Biochem Biophys Res Commun. 2018; 501(4):948-954. doi:10.1016/j.bbrc.2018.05.088 and US 20180327462. PEST degron FPs comprising Ub AARSs are described in US20190322714.

### 2) ERTPSs and ERAD-Associated Factors

[0514] In aspects, FPs/EPs comprise one or more sequences that are heterologous to the referenced sequence(s) and target the endoplasmic reticulum (ER), promotes processing of the polypeptide in the ER, or both. Such a heterologous sequence can be referred to as an ER targeting/processing sequence or “ERTPS.” Such FPs, which can be gDAgFPs or other FP EPs comprising one or more ERTPSs and one or more other referenced sequences, e.g., one or more antigens that are not associated with any gD sequences.

[0515] ER targeting/processing sequences can be, but may not be limited to, any ER targeting sequence which promotes the transport of a translation product into the ER. Once in the ER, such a translation product can be cleaved and presented by MHC class I molecules to drive an optimal immune response.

[0516] Many ER-targeting/processing sequences are known in the art and fusion proteins comprising ERTPSs can comprise any suitable type and number of ERTPSs. Examples of such sequences are described in U.S. Pat. No. 5,846,540; EP 2167123; Fu™ et al. J Virol. 1998; 72(2):1469-1481; Xu W et al. Virology. 2005; 334(2):255-263. doi:10.1016/j.virol.2005.01.040; Sher Y P et al, Am J Cancer Res. 2019; 9(9):2028-2036; Martinez-Puente D H et al. Cell Stress Chaperones. 2019; 24(1):149-158. doi:10.1007/s12192-018-0952-8; & Wang L, et al. Eur J Immunol. 2004; 34(12):3582-3594. doi:10.1002/eji.200425215.

[0517] In AOTI, a fusion protein encoded by a construct of the invention comprises an ERTPs selected from SEQ ID NOs: 511 and 598-642. Another exemplary ER targeting sequence encoded by SEQ ID NO:643 is described in Ciernik, et al (1986) Journal of Immunology. This sequence is encodes an E3/19K protein of adenovirus type 2, which comprises SEQ ID NO:644, which promotes ER retention and processing of associated sequences. See also, Anderson, K. et al., J. Exp. Med. I74:489 (1991). A similar E3 sequence of Ad2 is SEQ ID NO:645. In aspects, such a sequence is combined in the fusion protein with one of the 4-mer retention sequences described above, such as the well-studied KDEL sequence. Other sequences KITA also have been shown to have ERTPS effects including tPA sequences, calreticulin sequences (which is discussed above), and the IgKappa-chain leader sequence. Fusing an Ag with the chaperone Grp170 substantially can facilitates Ag access to the ER and could strengthen ER-associated protein degradation and antigen presentation.

[0518] Fusion protein-encoding constructs can AOA comprise 1+ sequences encoding one or more ERAD-associated factors. In other aspects, FPs lack any ERAD-associated factor-encoding sequences. ERAD is an abbreviation for “ER-associated protein degradation.” ERAD substrates are poly-ubiquitinated, which marks them for degradation by the 26S proteasome. As such, in aspects FPs comprise both a PTPS, e.g., 1+ polyUb sequences, and optionally one or more additional ERAD factors. Alternatively, a composition can comprise a nucleotide sequence that encodes one or more ERAD factors separately from any PTPS-containing FPs (e.g., a ubiquitinated FP).

[0519] Key mediators of ERAD substrate selection that can be encoded by nucleotide sequences for expression in the compositions and methods of the invention are ER-resident lectins and molecular chaperones, such as BiP, an ER-luminal heat shock protein of 70 kDa (Hsp70). ER lectins include calnexin and calreticulin, which promote ER retention of certain glycoproteins and ERAD targeting. Chaperones, such as BiP recognize peptides that are enriched in hydrophobic amino acids and target such proteins for ERAD. Other factors involved in ERAD also can aid in proteasomal processing of proteins, such as Herp, Hrd1, and Derlin-1, and ubiquitin ligases such as gp78, TRC8, and Doa10/TEB4. Herp also is a UBLP, reflecting, again, the overlap in the functionality of such factors and, indeed, degrons also can promote ERAD. However, while there is such overlap between ERAD factors and PTPS-related factors, ERTPs and PTPSs are distinct and, used individually or in combination, reflect unique approaches to the processing of related fusion proteins. Additional principles and compositions related to ERAD factors are discussed in, e.g., Ahner A et al. Trends Cell Biol. 2004; 14(9):474-478. doi:10.1016/j.tcb.2004.07.013; Morito D, et al. Mol Cell. 2015; 59(3):335-344. doi:10.1016/j.molcel.2015.06.010; Smith N et al. J Biol Chem. 2016; 291(29):15082-15092. doi:10.1074/jbc.M116.726265; and Ilana Shapira et al., Journal of Cell Science 2007 120: 4377-4387; doi: 10.1242/jcs.011247.

[0520] Alphaherpesvirus gD sequences also can promote ER targeting and processing. Such aspects of gD sequences are DFEH. In AOTI, a fusion protein comprises a gD sequence that promotes ER targeting/processing as well as at least one additional ERTPS. In AOTI, a fusion protein comprises a gD sequence that promotes ER targeting/processing and 1+ or 2+ heterologous ERTPSs, such as an E3 sequence, KDEL, or both. In still another aspect, a fusion protein also or alternatively further comprises or an associated nucleotide sequence also or alternatively encodes and expresses one or more sequences involved in PTPS processes as well as ER processes, such as ERAD, such as one or more degrons, ubiquitin ligases, ER lectin, chaperone, etc.

[0521] In AOTI, the inclusion of one or more ERTPSs detectably or significantly enhances ER processing. In AOTI, the inclusion of one or more ERTPSs also detectably or significantly enhances one or more aspects of immune response associated with the administration and expression of the construct, such as MHC I IR(s) or MHC II IR(s).

[0522] In AOTI, a composition is provided that comprises one or more NAMs encoding at least two separate/distinguishable fusion proteins, each of the at least two fusion proteins comprising one or more antigens, and the first of the at least two fusion proteins comprising one or more PTPSs (and optionally lacking any ERTPS) and the second comprising an ERTPS (and optionally lacking any PTPSs). In AOTI, the two fusion proteins are encoded by distinct sequences contained in different NAMs of a composition or a method is employed in which such different NAMS are associatively administered, such as through co-administration or sequential administration.

### c. Extracellular Targeting Sequences (ETSs)

[0523] In aspects, CEPs comprise ETS(s). An ETS is an AARS that DOS binds to a target presented outside of COEs (on another cell or in the milieu/microenvironment of the cell). An RBD is a typical type of ETS, but other types of ETSs also are within the broadest meaning of the term.

[0524] An EP can comprise any suitable type of ETS and any suitable number of ETSs. Typically, a single PPT will comprise a single ETS. However, in aspects, a single PPT can be bi-specific, comprising 2 ETSs. Single PPTs can also comprise additional ETSs (e.g., a WT gDP typical targets 3 different receptors). Multimeric PPTs often are multi-specific. E.g., Ab PPTs are often bispecific and other multimeric PPTs can be specific for 3, 4, 5, or more ETSs.

### 1) Immune Cell TSs (ICTSs)

[0525] In AOTI, constructs encode one or more fusion proteins comprising at least one sequence that effectively binds to one or more receptors on one or more immune system cells (“immune cell targeting sequences” or “ICTSs”). Effectiveness in terms of the binding of an ICTS to an immune cell receptor means at least a detectable levels of binding, typically a significant level of binding, and often further a level of binding detectably or significantly associated with one or more receptor binding-associated cellular/physiological events, such as uptake of the FP, inducement of a receptor binding-mediated effect, IR enhancement(s), or a combination of any or all thereof.

[0526] In AOTI, an ICTS binds ≥2 receptors, e.g., as many gD proteins bind ≥2 receptors (including HVEM & Nectin-1 WRT HSV-1 gD and Nectin-1 and Nectin-2 WRT HSV-2 gD). In AOTI, an ICTS also or alternatively can bind to multiple homologs of one or more types of receptors (e.g., as PRV gD is expected to bind both human Nectin-1 as well as its porcine homolog). In AOTI, one or more ICTSs of a fusion protein preferentially bind or specifically bind one type of sequence, such as a receptor and homologs thereof.

[0527] In aspects, an EP comprises ≥1 ETS. In aspects, an EP comprises only 1 ETS. In aspects an ETS is positioned at a terminus of the EP or near such an AARS terminus (e.g., within 20%, 15%, or 10% of the terminus based on number of AAs). In aspects, ETSs are positioned on or near both termini of an EP. In aspects, 1 ETS is positioned at or near an EP terminus. In aspects, the ETS is an RBD (e.g., a WT RBD, FF, or FV).

[0528] In AOTI, the target immune cell(s) that comprise the target receptor bound by one or more TS(s) of FP EP(s) can be characterized as being antigen-presenting cell(s) or “APC(s).” An “antigen-presenting cell” or “APC” refers to a cell that can process and display foreign antigens in association with major histocompatibility complex (MHC) molecules on its surface. An APC targeted by an extracellular TS can be any suitable APC. Examples of such cells include dendritic cells (DCs), macrophages, Langerhans cells, and B cells. Other cells that can act as APCs include, e.g., γδ-T cells, NK cells and fibrocytes (non-conventional APCs). In AOTI, a fusion protein is expressed from a construct of the invention that comprises a TS for a non-conventional APC. In one example, the invention provides a fusion protein that comprises a TS that binds to one or more targets expressed on γδ-T cells, such as a porcine γδ-T cell, e.g., in a fusion protein comprising one or more ASFV antigens.

[0529] In aspects, the target cell can be characterized as an adaptive IC, i.e., a B cell or a T cell). In aspects, the target cell also or alternatively can be characterized as a cell of the innate immune system, such as a macrophage or eosinophil. In still another aspect, the target cell is an ITIC, e.g., a DC or an NKC. A target cell may meet two or more of the categories that define various facets of such AOTI, as in the case of DCs.

### (a) DCR Targeting Sequences

[0530] In AOTI, a fusion protein of the invention comprises one or more ICTS that target a receptor on at least some dendritic cells. In AOTI, a fusion protein of the invention comprises a gD sequence that effectively binds a dendritic cell receptor (DCR). In AOTI, constructs of the invention encode at least one dendritic cell receptor binding sequence/ligand (a DCR targeting sequence or “DCRT”) that is heterologous to naturally occurring gD proteins (and that typically exhibits less than about 40% identity, less than about 30% identity, or less than about 20% identity to one or more wild-type gD proteins/sequences, such as all naturally occurring gD proteins). In AOTI, a fusion protein of the invention comprises a combination of one or more DCR-binding gD sequences and one or more DCR-binding heterologous sequences. In AOTI, the only DCR-binding sequences of the fusion protein are one or more gD sequences. In aspects, the only DCR-binding sequences of a fusion protein are non-gD sequences (in some such aspects the fusion protein comprises non-DCR-binding gD sequences and other polypeptides encoded by constructs of the invention comprising non-gD DCR-binding sequences lack any gD sequences).

[0531] In AOTI, a fusion protein comprises one or more DCRTSs that is a sequence of an antibody that binds to a DCR or a sequence that is at least highly related to such an anti-DCR antibody and that effectively binds the DCR. In aspects, a fusion protein also or alternatively comprises a DCRT that comprises a sequence from a naturally occurring ligand for a DCRT or a sequence that is at least related thereto and that effectively binds the DCR. In AOTI, the invention provides fusion proteins that lack any anti-DCR antibody sequences. In AOTI, the invention provides fusion proteins that lack any antibody sequences or any sequences that are highly related or substantially identical to an antibody sequence. Lacking a sequence in this and other respects where such terminology is used in this disclosure can mean that a sequence identical to such a sequence is not present, but any statement in this disclosure will be understood to implicitly also provide support for lacking sequences that are at least highly related to the referenced missing sequence. In AOTI, a DCRTS fusion protein will comprise a synthetic non-antibody DCR-binding sequence. In AOTI, the DCRTS is a multimeric protein, a multivalent protein, or both. One example of a multimeric synthetic DCRTS protein that can be adapted for use in contexts of this invention are the short (12-mer and 6-mer), Lys core trimeric CLEC10A-binding proteins described in Eggink L L et al. J Immunother Cancer. 2018; 6(1):28. doi:10.1186/s40425-018-0339-5), which can be adapted to include 1+Ag(s), to bind other DCRs, or both.

[0532] In one exemplary aspect, the invention provides fusion proteins that lack any sequences of more than 25 AAs in 1, 2, or 3+ contiguous sequences that collectively exhibit more than about 80% identity, such as more than about 90% identity, such as more than about 92%, more than about 95%, or more than about 97% (e.g., about 98-100%) identity to target-binding sequences of any Ab against any cellular receptors discussed herein.

[0533] Any one or more suitable DCRs can be targeted by DCRTs in FPs. Numerous DCRs are KITA. Often DCRs will also be present on other cells, such as is the case with HVEM. In addition to HVEM, examples of such DCRs that can also or alternatively be targeted by DCRTs of fusion proteins of the invention include Langerin/CD207 (relevant principles and compositions discussed in Juliana Idoyaga et al. PNAS. February 2009, 106 (5) 1524-1529; DOI: 10.1073/pnas.0812247106 and Idoyaga J et al. J Immunol. 2008; 180(6):3647-3650. doi:10.4049/jimmunol.180.6.3647); mannose receptor (MR); Toll-like receptors (TLRs); C-lectin receptors (CLRs) and other pattern recognition receptors (PRRs) (SFE Lundberg K et al. Immunology. 2014; 142(2):279-288. doi:10.1111/imm.12252; van Kooyk Y. Biochem Soc Trans. 2008; 36(Pt 6):1478-1481. doi:10.1042/BST0361478 and van Dinther D et al. J Leukoc Biol. 2017; 102(4):1017-1034. doi:10.1189/jlb.5MR0217-059RR), such as DC-SIGN (DC-specific ICAM-3-grabbing nonintegrin) (relevant principles and compositions, such as ligands and antibodies, are discussed in Jarvis C M et al. PNAS 2019; 116(30):14862-14867. doi:10.1073/pnas.1820165116; Engineering A et al. J Immunol. 2002; 168(5):2118-2126. doi:10.4049/jimmunol.168.5.2118; Zhou T et al. Cell Mol Immunol. 2006; 3(4):279-283; Noll A J et al. Biochem J. 2016; 473(10):1343-1353. doi:10.1042/BCJ20160046; Feng D et al. Clin Exp Immunol. 2018; 191(1):107-115. doi:10.1111/cei.13048; and Cai M et al. J Transl Med. 2013; 11:103. doi:10.1186/1479-5876-11-103; see also US 20080019998), C-type lectin 12a (Clec12a), C-type lectin immunoreceptor (CIRE), and DC-associated C-type lectin 1 (Dectin 1); Heat Shock Protein receptors; CD11c, and other DC-associated integrin receptors; FC receptors, such as the FC gamma receptor (SFE Guilliams M et al. Nat Rev Immunol. 2014 May; 14(5):349] and Nat Rev Immunol. 2014; 14(2):94-108. doi:10.1038/nri3582); the CD40 receptor (SFE Ma D Y et al. 2010 June; 22(3):190]. Semin Immunol. 2009; 21(5):265-272. doi:10.1016/j.smim.2009.05.010); CLEC9A (SFE Zhang J G, et al, Immunity. 2012; 36(4):646-657. doi:10.1016/j.immuni.2012.03.009); chemokine receptors such as CCR7, CCR4, CCR6, and CXCR5 (SFE Oppenheim J J et al. Arthritis Res. 2002; 4 Suppl 3(Suppl 3):S183-S188. doi:10.1186/ar574); CLEC10A; MRC1, Dectin-2 (CLEC6A); Mincle; MMR; DNGR-1; DC-ASPGR; LOX-1; BST-2; DCIR (CLEC4A, Clec4A2); f4/80-like receptor (FIRE); DCIR2 (CLEC4A4); scavenger receptor (SR); DCAR1; and dendritic and epithelial cell receptor of 205 kDa (“DEC205” or “DEC-205”) receptors (another type of CLR), which are discussed in further detail below (principles related to several of these receptors are discussed in, e.g., Nchinda G et al. J Clin Invest. 2008; 118(4):1427-1436. doi:10.1172/JCI34224; Sehgal K et al. Immunol Lett. 2014; 162(1 Pt A):59-67. doi:10.1016/j.imlet.2014.07.004; Hossain M K, Wall K A. Use of Dendritic Cell Receptors as Targets for Enhancing Anti-Cancer Immune Responses. Cancers (Basel). 2019; 11(3):418. Published 2019 Mar. 24. doi:10.3390/cancers11030418; and Hoober J K et al. Front Immunol. 2019; 10:2880. Published 2019 Dec. 11. doi:10.3389/fimmu.2019.02880).

[0534] In AOTI, the DCRTS(s) of FP(s) comprise AARS(s) that comprises at least a functional fragment of a naturally occurring ligand for the DCR or a variant thereof that has a sequence that is at least related to the naturally occurring ligand and exhibits suitable, similar, or superior functionality as compared to the naturally occurring ligand. Naturally occurring peptide ligands of DCRs include Flt3L, F-actin, myosin II, exposed actin filament proteins, defensins, and chemokines such as SLC/CCL21, ELC/CCL19, and BLC/CXCL13. These and other types of naturally occurring ligands, functional fragments thereof, and functional fragments thereof that are related, very related, highly related, or substantially identical to a functional sequence of the naturally occurring ligand and that suitably, substantially equivalently, or more effectively binds its DCR. In aspects, the invention provides fusion proteins that comprise one or more DCRTs that are antigens known to bind DCRs, such as HCV core protein, HIV envelope protein, and the H. pylori Lewis Antigen.

[0535] The DCR(s) targeted by TS(s) are selected based on desired function(s). Some DCRs generate inhibitory signals (e.g., CLEC4A4), whereas others are stimulatory. In AOTI, the invention provides fusion proteins that comprise at least one DCRTS that binds to a stimulatory DCR. In AOTI, the invention provides fusion proteins that only contains DCRTSs that bind stimulatory DCRTSs. In AOTI, such a fusion protein comprises no gD sequences. In aspects, such a fusion protein comprises a gD:antigen portion, such as an antigen-gD profusion domain fusion protein. In either case, such a fusion protein can comprise a gD signal sequence in initial/immature form.

[0536] In aspects, the selection of DCRTS also or alternatively is made in consideration of the type of DC(s) to be targeted. In general, fusion proteins of the invention can target any suitable type of DC. In AOTI, a fusion protein comprises a DCRTS that binds to a DCR on myeloid DCs (MDCs) or DCs that are characterized generally as conventional DCs. The MDC targeted by a DCRTS can be BDCA1+ MDCs, BDCA3+ MDCs, or both. In aspects, a fusion protein comprising a DCRT that also or alternatively binds to a DCR on plasmacytoid dendritic cells (PDCs) (e.g., BDCA-2, DCIR, TLR-7, or TLR-9). In AOTI, the DCRTS binds to a DCR on CD8α−/CD1c+ DCs (e.g., DEC-205, DCIR-2, or TLR-7). In AOTI, the DCTRS also or alternatively binds to a DCR on CD8α+/CD141-DCs (e.g., CLEC9A, DNGR-1, TLR-3, DEC-205, and DCAR1). In AOTI, the fusion protein comprises a DCRTS that binds both such types of cells (e.g., a DCTRS that binds DEC-205). In aspects, the DCTRS also or alternatively binds to a DCR expressed in skin DCs (e.g., DC-SIGN, or Langerin). In AOTI, the DCRTS binds to a receptor in DC precursor cells. In aspects, the DCRTS binds to a receptor that is also or alternatively present in immature DCs. In still another aspect, the DCRTS binds a receptor that is also or alternatively expressed in mature DCs. The biology of various DCs and DCRs is discussed in, e.g., Hossain M K et al. Cancers (Basel). 2019; 11(3):418. doi:10.3390/cancers11030418 and Macri C et al. Semin Cell Dev Biol. 2018; 84:11-21. doi:10.1016/j.semcdb.2017.12.009.

[0537] Because many, if not most, of the ligands for DCRs consist of or comprise non-amino acid sequence components, or are unknown, the use of antibody sequences to bind DCRs can be useful. Numerous effective antibodies to DCRs have already been developed in the art and the development of additional effective antibodies is possible without undue experimentation. From such antibodies, effective DCR binding sequences can be determined and encoded into constructs that express antibody sequence DCRTS fusion proteins, which can be gD:antigen fusion proteins or non-gD sequence fusion proteins. Thus, for example, a fusion protein of the invention can comprise a variable region of an anti-DCR antibody, an effective single-chain variable fragment (ScFv), or an effective combination of anti-DCR CDR regions. Examples of ScFv molecules that target DCRs are described in, e.g., WO 2019/082208.

[0538] In AOTI, FPs comprising DCRTSs are multimeric. In AOTI, the multimeric DCRTS fusion protein comprises an antibody multimerization domain. In aspects, the DCRTS fusion protein is a trap protein formed of a multimerization domain and two or more receptor-binding ligand domains.

[0539] In AOTI, the DCRTS results in DOS internalization of Ags by MHC class I/II molecules. In AOTI, the DCRTS causes a DOS increase in IR(s). In AOTI, the immune response is a stimulatory immune response against at least one disease-causing agent (the DCRTS promotes immunity rather than tolerance). In AOTI, the DCTRS results in enhanced Th1 response, enhanced CD8+ response, or both, to the disease-causing agent. In AOTI, the presence of the one or more DCRTSs results in a detectable or significant enhancement of both CD4+ and CD8+ T-cell responses. In AOTI, the DCRTS also or alternatively detectably or significantly promotes cross-presentation (i.e., presentation of exogenous antigen by MHC class I). In AOTI, DCRTS FPs induce cross-presentation of AgFPs or co-expressed Ags. In AOTI FP(s) comprise a DCRTS that targets Langerin on Langerhans cells, a TLR, a DC-associated heat shock protein (e.g., by a FP comprising a HSP-binding lectin-like oxidized LDL receptor 1 sequence), or DC-SIGN or DEC-205.

[0540] In AOTI, a FP comprising a DCRTS is expressed in the context of cells that are activated by an initial exposure to an ITICSTAP, such as EAT-2. An AOTI is a method of inducing IR(s) comprising activating DCs by, e.g., expression of an ITII-encoding nucleotide sequence or administration of an ITII, such as an EAT-2, followed delivery of DCRTS FP(s).

### * DEC-205 and DEC-205 Ligands/Keratins

[0541] An aspect is a FP comprising a DCRT that binds to a DEC-205 protein (e.g., human DEC-205, porcine-DEC-205, chicken DEC-205, and homologs thereof) (SFE Staines K et al. PLoS One. 2013; 8(1):e51799. doi:10.1371/journal.pone.0051799).

[0542] In AOTI, a DEC-205-binding FP is co-administered with a construct comprising one or more sequences encoding one or more DC stimulating factors, such as an ITICSTAP, e.g., an EAT-2 PPT. In AOTI, the DEC-205-binding FP is administered following DC stimulation, such as DC stimulation with an EAT-2 polypeptide or other ITIC IM. In AOTI, a DEC-205-binding FP is administered with 1+ agents that detectably enhance the acidity of the DC microenvironment, detectably improve DEC-205-uptake of the fusion protein or DEC-205-related biological activity, or exhibits a combination thereof.

[0543] In AOTI, the presence of a DEC-205-binding sequence or other DCRTS results in DOS enhanced DC binding or DC uptake of the fusion protein (e.g., in one aspect the presence of the DCRTS, such as a DEC-205 TS results in an increase in DC uptake of the associated fusion protein of at least about 20%, at least about 50%, at least about 100% (2×), or at least about 200% (3×)). In AOTI, the delivery of an effective amount of the DCRTS fusion protein results in a detectable or significant increase in the amount of interferon gamma-secreting T cells in the subject receiving the DCRTS FP.

[0544] In AOTI, a DEC-205-targeting sequence FP comprises one or more DEC-205-targeting keratin sequences. Portions of certain keratin proteins are ligands for DEC-205. Specifically, DEC-205 recognizes the C-Terminal Gly-Rich Region of certain keratin proteins, such as keratin 1 and keratin 10. Such domains typically include glycine- and serine-rich domains in a a X(Y)n format, where X represents an aromatic or a long-chain aliphatic residue and Y is either glycine or serine. The X(Y)n pattern in such domains typically is quasi-repetitive and may form “glycine loops” where the Gly-rich peptides have flexible loop-like structures without rigid conformations. The keratin sequences of the fusion protein are exposed, e.g., by design of the fusion protein (e.g., by connection to a flexible linker). Relevant PMCs are described in Cao L et al PNAS 2016; 113(47):13438-13443. doi:10.1073/pnas.1609331113.

[0545] Fusion proteins of the invention also or alternatively can express keratins that additionally or alternatively exhibit other functions than DEC-205 binding. For example, fusion proteins of the invention can comprise kertain-4, keratin-6, keratin-8, keratin-13, keratin-17, kertain-18, keratin-19, or sequences that are known to induce immune cell responses, such as immune cell cytopathic activities, related to pathogenic infection, cancer, or both. Such keratins can act as, e.g., “eat me” signals to immune cells, such as certain innate immunity cells or innate trained immunity cells. In aspects, expression of such keratins can add structural and functional support to cells to resist physical degradation/attack by disease-causing agents, such as pathogenic microbes. Related compositions and principles are described in, e.g., Geisler F, et al. Cells. 2016; 5(3):29. doi:10.3390/cells5030029.

[0546] In aspects, fusion proteins of the invention, which may or may include gD sequences, can comprise one or more anti-DEC-205 antibody DEC-205 targeting sequences. Anti-DEC-205 antibodies are known in the art. For example, the vaccine (CDX1401, Celldex Therapeutics, Hampton, N.J., USA) comprises a human anti-DEC205 monoclonal antibody fused to full-length tumor antigen NY-ESO-1 along with TLR agonists resiquimod (TLR 7/8 agonist) and Hiltonol (polyICLC, TLR3 agonist), resulting in robust humoral and cellular immunity against NY-ESO-1 and even in patients where NY-ESO expression was not present in the patient tumor (Sehgal K et al. Immunol Lett. 2014; 162(1 Pt A):59-67. doi:10.1016/j.imlet.2014.07.004) (see also, Hua Y, Jiao Y Y, Ma Y, et al. Int Immunopharmacol. 2017; 46:62-69. doi:10.1016/j.intimp.2017.02.023; Niezold T et al. Immunology. 2015; 145(4):519-533. doi:10.1111/imm.12467; and Birkholz K et al. Blood. 2010; 116(13):2277-2285. doi:10.1182/blood-2010-02-268425), which each describe a fusion protein comprising an anti-DEC205 single-chain Fv fragment (scDEC) and an antigen, an approach that can be applied to DEC-205-targeting sequence FPs). Additional Abs against DEC-205 and related PMCs are described in US 2013/0101593.

[0547] In AOTI, the administration of an effective amount of a DEC-205-binding fusion protein, such as by administration of a composition comprising a construct encoding such a fusion protein, results in detectable or significant increase in relevant MHC II products, a detectable increase in antigen presentation, or both. In AOTI, antigen presentation associated with the DEC-205-binding fusion protein is increased by at least about 25%, at least about 33%, at least about 50%, at least about 100% (2×), at least about 200% (3×), at least about 5×, at least about 10×, at least about 20×, at least about 50×, or even at least about 100×. In AOTI, the administration of the DEC-205-targeting sequence fusion protein results in detectably or significantly enhanced IL-2 expression from CD4+ T cells (e.g., expression levels of at least about 0.2, 0.3, 0.4, 0.5, 1, or 1.2 ng/mL). In aspects, the administration of the DEC-205-targeting sequence fusion protein also or alternatively results in a detectable or significant enhancement of TNFalpha expression in the subject or cells (e.g., expression levels of at least about 0.1 or at least about 0.2 ng/mL). In still a further aspect, the administration of the DEC-205-targeting sequence fusion protein also or alternatively results in a detectable or significant enhancement of interferon gamma expression in the subject or immune cells (e.g., expression levels of at least about 0.3, 0.4, 0.5, or 0.7 ng/mL). In an exemplary aspect, the administration of the DEC-205-targeting sequence fusion protein also or alternatively results in at least about 2×, at least about 3×, or at least about 4×, 5×, 10×, or more expression of IL-2, TNFalpha, interferon gamma, or a combination of some or all thereof in the subject or cells. In AOTI, the administration of the DEC-205-targeting sequence fusion protein results in a detectable or significant reduction of the IL-10/IL-2 ratio in the subject or cells. In AOTI, the delivery of the DEC-205-binding fusion protein does not significantly alter the phenotype or functionality of DCs in the subject/milieu. Methods related to such aspects are described in, e.g., Birkholz K et al. Blood. 2010; 116(13):2277-2285. doi:10.1182/blood-2010-02-268425. In AOTI, delivery of the DEC-205-binding FP AOA does not DOS induce tolerance to any associated Ags expressed with or contained in the fusion protein. It will be understood in this and other aspects of this disclosure that any aspect described with respect to a subject, animal, vertebrate, cell, or cells, can be extended to the performance of the related method, observance of the effect, and the like, in a related population (e.g., in a statistically significant proportion of a population in an adequately powered and properly conducted clinical trial).

[0548] In AOTI, a DEC-205-binding fusion protein will be a multimeric protein, a multivalent protein, or both. In AOTI, the DEC-205-binding fusion protein will comprise one or more other extracellular target TSs (e.g., a gD receptor-binding gD sequence). In AOTI, the DEC-205-binding fusion protein is monospecific. In other aspects, a DEC-205-binding fusion protein is multi-specific (e.g., binding both Nectin-1 and DEC-205). In AOTI, the DEC-205 is a DEC-205-trap protein. In AOTI, the DEC-205-binding trap protein comprises at least one, two, three, five, or more antigenic sequences, wherein the antigen sequences are optionally bound to each other, the DEC-205 TS, or both, by linkers, and the antigens are also or alternatively associated with one or more internal TSs, such as one or more PTPSs, one or more ERTPSs, or both. In AOTI, the DEC-205 trap is administered with an ITII that significantly activates DCs, such as an EAT-2 polypeptide, which is either administered before or expressed with the DEC-205-binding trap protein-encoding construct.

### vii. Cell Penetrating Peptides

[0549] In aspects, EP(s) comprise cell penetrating peptide sequence(s) (CPPS(s)). Cell-penetrating peptides (CPPs) are short peptides/sequences that facilitate cellular intake and uptake of molecules associated with the CPP through either a covalent bond (an FP) or non-covalent interaction. A CPPS can be either a polycationic CCPS, amphipathic CCPS, or hydrophobic/apolar CCPS. A CCPS can operate by any suitable uptake pathway (e.g., endocytosis, macropinocytosis, etc.). In an aspect, a CCPS is a transactivating transcriptional activator (TAT) of an HIV (e.g., HIV-1) (e.g., RKKRRQRRRR (SEQ ID NO:729)). In other aspects CPPSs are of or are FF or FVs of one or more of antennapedia, transportan, polyarginine, penetratin or any of the other CPPs described I CYTOPLASMIC VESICLES-ADVANCES IN RESEARCH AND APPLICATION: 2013 Edition (Q Ashton Acton, General Ed.) (ISBN: 978-1-481-69922-8) (SFE pgs. 68-69). In aspects, a CCPS-associated EP has a size of between about 30 kDa and about 150 KDa (e.g., about 30-120 kDa, about 30-100 kDa, or about 30-80 kDa). Additional CPPs and aspects thereof that can be adapted to such AOTI are described in, e.g., Ziegler A et al. Biochemistry. 2005; 44(1):138-148. doi:10.1021/bi0491604; Milletti F (August 2012). Drug Discovery Today. 17 (15-16): 850-60. doi:10.1016/j.drudis.2012.03.002. PMID 22465171; & Stewart K M et al. Organic & Biomolecular Chemistry. 6 (13): 2242-55. doi:10.1039/b719950c. PMID 18563254. In AOTI, an EP comprises ≥1 CPPSs. In AOTI, an EP comprises only 1 CPPS. In AOTI, a CPPS is placed at a terminus or in the first/last 20% of an AARS of a FP. In aspects, a CPP is placed on the opposite end of a FP from a RBD. In aspects, the CPPS is indirectly bound to the rest of the FP, e.g., through a FL, MSL, or MSFL.

### viii. Antigens, Epitopes, and Immunogens

[0550] Constructs can comprise 1+ antigen-encoding sequences (AgESs), expressed as antigens (Ags) and inducing IR(s) in TR(s) and cells. AgESs can be delivered & expressed in any suitable manner to induce such IR(s).

[0551] In aspects, NAMs may be taken up by APCs such that AgESs are expressed in APCs and directly presented to lymphocytes to elicit a cellular and/or humoral immune response. In AOTI, the NAM is targeted in one or more ways so as to detectably or significantly promote uptake by APCs. For example, association with some transfection-promoting agents, such as calcium phosphate nanoparticles, may be associated with a detectably or significantly rate of uptake by APCs. Construct AOA can be contained in a vector that comprises one or more elements that specifically target an APC (e.g., an adenoviral vector comprising a sequence that targets a DCR).

[0552] In aspects, constructs comprising AgESs, such as gDAgFPESs, AOA taken up by other cells of the subject or milieu (e.g., fibroblasts, epithelial cells, carcinoma cells, neurons, other immune cells (e.g., T cells or B cells), etc.). An EA of an expressed FP is thereafter released from COEs and taken up by APCs in the subject or microenvironment/milieu, such as DCs. In aspects, a fusion protein can comprise one or more APC targeting sequences, such as a DCRTS.

[0553] Regardless of how the antigens encoded by the AgES reach APCs, it is expected that such antigens will be bound to major histocompatibility complex (MHC) class I and II molecules and brought to the surface of the antigen presenting cell along with the associated MHC molecules. The surface antigens are then expected to be presented to immature T cells containing the cluster of differentiation 8 transmembrane glycoprotein (CD8+ T cells) and CD4+ cells. In the case of MHC class I presentation, this can result in the activation of the immature CD8+ T cells into mature antigen-specific CD8+ T cells (also known as cytolytic T cells or killer T cells), which subsequently target and kill cells expressing the antigen or a related, endogenous antigen, thereby providing a therapeutic or prophylactic immunity effect in the subject or milieu.

[0554] CEPESCs can encode any number of suitable antigens, each being any suitable type of Ag. The term “antigen” is known in the art and, accordingly, is not limited to any specific definition herein. In general, an antigen refers to a molecule containing one or more epitopes (either linear, conformational, or both) that will stimulate a host's immune system, typically to make a humoral (B-cell) and/or cellular (T-cell) antigen-specific response. Terms such as “antigenic protein” or “antigenic polypeptide” is a polypeptide as defined above which contains at least one epitope. An “antigenic fragment” of an antigenic protein is a partial sequence of said antigenic protein comprising at least one epitope. An “antigenic sequence” refers to an amino acid sequence comprising at least one epitope. The term antigen is sometimes abbreviated as “Ag.” Although antigens have been well-studied and are well-understood in the art given the centrality of antigens to the invention they are nonetheless discussed extensively here. Again, such description is meant to illuminate certain aspects of the invention and should not be deemed limiting.

[0555] Antigens in the context of fusion proteins and constructs of the invention are peptides. An antigenic sequence (antigen/Ag) can be of any length, ranging in size from a few amino acids in length to hundreds of amino acids in length (e.g., an antigen can be 1000, 900, 800, 700, 600, 500, 400, 350,340,330,320,310,300,290,280,270,260,250,240,230,220,210, 200,190,180,170,160,150,140,130,120,110,100,90,80,70,60,50,40, 30, 20, 10 or less amino acids in length). An antigen can comprise one epitope or multiple epitopes. FPs can comprise one antigen or ≥2 Ags. Typically, what defines one antigen and separates it from other Ags is its composition, such as its relationship to a naturally occurring DCA-associated Ag (e.g., by being RVRHRSIOI to such a DCA-associated Ag, while also retaining suitable, essentially equivalent, or superior antigenicity WRT thereto).

[0556] Antigens can be associated with any suitable type of disease-causing agent (DCA), such as a tumor or a pathogen. Thus, examples of known antigens that can be included in EPs include AChR (fetal acetylcholine receptor), ADGRE2, AFP (alpha fetoprotein), BAFF-R, BCMA, CAIX (carbonic anhydrase IX), CCR1, CCR4, CEA (carcinoembryonic antigen), EGP-2 (epithelial glycoprotein-2), EGP-40 (epithelial glycoprotein-40), EGFR(HER1), EGFR-VIII, EpCAM (epithelial cell adhesion molecule), EphA2, ERBB2 (HER2, human epidermal growth factor receptor 2), ERBB3, ERBB4, FBP (folate-binding protein), Flt3 receptor, folate receptor-a, GD2 (ganglioside G2), GD3 (ganglioside G3), GPC3 (glypican-3), GPI00, hTERT (human telomerase reverse transcriptase), kappa-light chain, KDR (kinase insert domain receptor), LeY (Lewis Y), L1CAM (LI cell adhesion molecule), LILRB2 (leukocyte immunoglobulin like receptor B2), MARTI, MAGE-A1 (melanoma associated antigen A1), MAGE- A3, MSLN (mesothelin), MUC16 (mucin 16), MUCI (mucin I), KG2D ligands, NY-ESO-1 (cancer-testis antigen), PRI (proteinase 3), TRBCI, TRBC2, TFM-3, TACI, tyrosinase, survivin, hTERT, oncofetal antigen (h5T4), p53, PSCA (prostate stem cell antigen), PSMA (prostate-specific membrane antigen), hRORI, TAG-72 (tumor- associated glycoprotein 72), WT-1 (Wilms tumor protein), and antigens of hepatitis B, hepatitis C, CMV (cytomegalovirus), EBV (Epstein-Barr virus), and HPV (human papilloma virus). Ags will comprise one or more epitopes, which may or may not be known.

[0557] The term “epitope,” which also known in the art as an “antigenic determinant,” refers to a structural portion of a biomolecule, typically an AARS or collection of AAs, that is recognized by the immune system. Epitope recognition can come in the form of binding of antibodies, B cells, or T cells to the epitope(s). Epitopes bound by antibodies or B cells are referred to as “B cell epitopes” and the epitopes bound by T cells are referred to as “T cell epitopes.”

[0558] Epitopes for NK cells also have recently been identified (SFE Sim et al. Human NK cell receptor KIR2DS4 detects a conserved bacterial epitope presented by HLA-C. Proc Natl Acad Sci USA. 2019; 116(26):12964-12973. doi:10.1073/pnas.1903781116). In one aspect of the invention, the FNSs of an NAM of a composition encode at least one NK cell antigen, in addition to one or more T cell antigens (typically at least one MHC-I antigen and at least one MHC-II antigen), and one or more B cell antigens.

[0559] Binding with respect to interactions between biological molecules discussed herein typically means “specific binding,” as that term is understood in the art (aspects of specific binding are also discussed elsewhere herein). In a typical embodiment, specific binding means binding between one agent, e.g., an antibody or T cell receptor (“TCR”) and a second agent, e.g., a respective epitope of the first agent, of 1×10⁵ M⁻¹ or higher, or of 1×10⁶ M⁻¹, 1×10⁷ M⁻¹, 1×10⁸ M⁻¹ or higher (see e.g. Caoili, S. E. (2012) Advances in Bioinformatics Vol. 2012 for a discussion of related principles). In AOTI, Ag(s) exhibit such affinity for Ag-binding IC PPTs, such as TCRs, BCRs, MHC PPTs, etc.

[0560] Epitopes usually consist of chemically active surface groupings of molecules such as amino acids or sugar side chains and usually have specific three-dimensional structural characteristics, as well as specific charge characteristics. The term “epitope” generally refers to conformational as well as non-conformational epitopes. Conformational and non-conformational epitopes are distinguished in that the binding to the former but not the latter is lost in the presence of denaturing solvents. T cell epitopes often are non-conformational (i.e., they are linear), while B cell epitopes can be conformational or non-conformational. Epitopes formed from contiguous amino acids (also known as linear epitopes) are typically retained on exposure to denaturing solvents whereas epitopes formed by tertiary folding (also known as conformational epitopes) are typically lost on treatment with denaturing solvents. Methods of determining spatial conformation of epitopes include, for example, x-ray crystallography and 2-dimensional nuclear magnetic resonance. SFE Epitope Mapping Protocols, in Methods in Molecular Biology, Vol. 66, Glenn E. Morris, Ed. (1996). In AOTI, constructs of the invention encode, a fusion protein comprises, or both, one or more non-conformational/linear epitopes. In AOTI, a fusion protein comprises, compositions of the invention comprise nucleotide sequences that encode, or both, antigens at least primarily comprising linear epitopes. In still a further aspect, the epitopes of a fusion protein or that are encoded by the nucleotide sequences of a composition of the invention will generally consist of, substantially consist of, or consist of linear epitopes. It is possible in any such context that a conformational epitope-containing composition, such as an inactivated viral vaccine, can be administered in association with any such composition of the invention.

[0561] Normally, an AARS epitope will include between about 3-24 amino acids such as about 5-20 amino acids, such as about 6-18 amino acids (e.g., about 4-18, 4-17, 5-18, or 5-17 amino acids). Normally, a B-cell epitope will include at least about 5 amino acids but can be as small as 3-4 amino acids. A T-cell epitope, such as a CTL (MHC-I) epitope, will typically include at least about 7-9 amino acids to about 9-11 amino acids, and a helper T-cell (MHC-II) epitope typically will include at least about 12-18 amino acids, most often 13-17 amino acid residues. A T-cell epitope can in one aspect refer to an amino acid sequence or a collection of associated amino acids that is about 7 to about 20 amino acids, such as about 8 to about 18 amino acids (e.g., an 8 to 10 amino acid sequence/collection or a 12 to 17 amino acid collection), which typically can be presented by either an MHC Class I or MHC Class II molecule.

[0562] The terms MHC Class I and MHC Class II herein are meant to apply to such molecules from any species and functional variants thereof, rather than indicating such sequences of any species. In this respect, MHC Class I molecules/antigens encompass HLA-A molecules/antigens and MHC Class II molecules/antigens encompass HLA-B molecules/antigens.

[0563] In embodiments of the invention, antigenic sequences can comprise flanking sequences in addition to a core epitope sequence, where the core epitope sequence will have the characteristics described above (e.g., being about 7-10 amino acids long, typically 9 amino acid residues long, in the case of an MHC-I sequence). Flanking sequences are typically identical to or highly related to the sequences of the protein from which the core epitope sequence is also derived that flank the antigenic sequence in its endogenous setting. Flanking sequence(s) can be at least about 5, at least about 10, at least about 15, at least about 20, at least about 25, at least about 30, or at least about 40 amino acids in length upstream or downstream of the core epitope sequence. In AOTI, one or more antigens of a fusion protein or other expression product of a construct will comprise both upstream and downstream flanking sequences. In AOTI, the flanking sequence detectably enhances or significantly enhances one or more MHC response to the antigen in a subject. Additional aspects of the invention relating to flanking sequences are DFEH.

[0564] Typically, an antigen is derived from a disease-associated biological source, such as a pathogenic organism, virus, or a cancer cell (a “disease-causing agent”). In aspects, an antigen of a fusion protein also or alternatively can be a variant of a disease agent-associated antigen (e.g., an “editope,” which are described in detail elsewhere herein). In aspects, an antigen can comprise a synthetic mimotope or a sequence thereof. Mimotopes are macromolecules, in the context of expression products of the invention amino acid sequences, which mimic a naturally occurring antigen, binding the same receptor or other binding partner with at least substantially similar binding as the binding partner:antigen binding under similar conditions (e.g., +/− about 33%, about 25%, about 15%, or about 10% of the binding affinity of the antigen:binding partner binding). Where appropriate, antigens described herein can be substituted with an appropriate mimotope or antigenic portion thereof. Mimotope sequences can be particularly relevant in the targeting of DCRs given the significant number of non-peptide ligands associated with DCRs. Accordingly, In AOTI, a fusion protein of the invention or other expression product of the invention comprises a DCRTS that is a mimotope or an antigenic portion thereof. In AOTI, one or more mimotope sequences of a fusion protein is/are cancer antigen mimotope(s). In AOTI, one or more mimotope sequences of a fusion is/are pathogen antigen epitopes. Examples of both types of mimotopes are known in the art. SFE Zhao L et al. Expert Rev Vaccines. 2008; 7(10):1547-1555. doi:10.1586/14760584.7.10.1547; Kozbor D. Immunol Res. 2010; 46(1-3):23-31. doi:10.1007/s12026-009-8120-y; Chen L. Curr Opin Immunol. 1999; 11(2):219-222. doi:10.1016/s0952-7915(99)80037-5; and US20080019992A1 (with respect to cancer antigen mimotopes) and Zhong Y et al. Virol J. 2011; 8:542. doi:10.1186/1743-422X-8-542; Magliani W et al. Curr Med Chem. 2004; 11(13):1793-1800. doi:10.2174/0929867043364964; U.S. Pat. No. 7,892,557, US20120148594, US20190070248, & WO2007022557A1 (describing various pathogen-associated mimotopes). Methods relating to the identification of mimotopes are exemplified in, .e.g., Li D et al. Int J Biol Sci. 2018; 14(4):461-470. doi:10.7150/ijbs.22692; Partidos C D. Curr Opin Mol Ther. 2000; 2(1):74-79; U.S. Pat. No. 7,166,694; and EP 0387276B1. Peptide mimotopes of carbohydrate antigens are described in, e.g., Kieber-Emmons T. Immunol Res. 1998; 17(1-2):95-108. doi:10.1007/BF02786435. In AOTI, a fusion protein comprising at least one mimotope of a non-protein (e.g., lipid, carbohydrate, or mixture thereof) or modified protein (e.g., glycoprotein or lipoprotein) is provided. In one such aspect, the mimotope targets a receptor on an immune system cell, such as a DC. In some aspects, there can be an overlap in the meaning of the terms “editope” and “mimotope,” as some in the art apply the term “mimotope” to modified epitopes (SFE Slansky J E et al. Semin Immunol. 2020; 47:101395. doi:10.1016/j.smim.2020.101395). Aspects describing the use of the one type of antigen should be considered to provide support for other and vice versa except where specifically indicated or clearly contradicted.

[0565] The term “immunogen” can be used to refer to a molecule that induces, promotes, or enhances one or more immunological responses or that otherwise modulates or interacts with the immune system of a vertebrate. An “immunogenic polypeptide” is a PPT which, when introduced into a vertebrate that similarly induces, promotes, or enhances IR(s) or that modulates or interacts with the immune system of a vertebrate, such as a mammal or a bird. “Immunogenic sequences” are construed similarly.

[0566] Antigenic PPTs/AARSs are typically immunogenic (where conformational changes are required to present an epitope an antigenic sequence or polypeptide might situationally not be immunogenic). Immunogenic PPTs & AARSs thus include antigenic PPTs & AARSs, but also can include polypeptides and sequences that primarily upregulate immune system activity through other functions. Examples of such immunogenic PPTs and sequences include cytokines, such as interleukins (ILs) (e.g., IL-2), and innate adaptive immunomodulators, such as EAT-2 PPTs. Immunogens include non-peptidic molecules, such as ISNSs, beta glucans, and lipopolysaccharides.

[0567] An “immunological response” or “immune response” (“IR”) means any detectable response, such as one or more significant responses, of the immune system or any one or more constituents/components thereof to a factor, event, or a composition in a subject, tissue, cell, cell-containing composition, or a population of any thereof, depending on the context in which the phrase is used. An immunological response in the context of the methods and compositions of the invention can comprise a humoral immune response (mediated by antibody molecules), a cellular immune response (mediated by T-lymphocytes, such as cytolytic T-cells (CTLs), helper T cells, or both), an innate immune response (mediated by cells of the innate immune system, such as macrophages), an innate trained/adaptive immune response (mediated by innate trained immune cells, which currently are known to comprise natural killer (NK) cells (or NKCs) and dendritic cells (DCs), or a combination of two or more thereof), or a combination of some or all thereof. One common component of an immune response will be the increased production of cytokines, chemokines and other such molecules produced by cells of the immune system activated in response to an immunogenic composition. Other aspects of immune responses are described herein. An advantage of many embodiments of the present invention is the ability to produce a detectable, significant, clinically relevant, or effective (significantly therapeutic or protective) immune responses in at least two, often at least three “domains” of the immune system in a subject, such as promoting a T-cell/cellular immunity IR, a B-cell/humoral IR, and an innate adaptive immunity IR. The inventors have discovered that such multi-domain immune responses are often necessary for effective protection or treatment of immunological conditions.

### a. Cellular Epitope Recognition

[0568] In AOTI, antigens of fusion proteins and other expression products of constructs of the invention are characterized by, possibly in combination with other characteristics of antigens/epitopes described herein, by the type of cells that recognize the antigen. As each type and subtype of immune system antigen-recognizing cell can exhibit different immunological effects, and antigens associated with different cells often have different physiochemical properties, such characterizations of antigens in fusion proteins or otherwise expressed by constructs can help illuminate various aspects of the invention.

### 1) T Cell Epitope and TCE IRs

[0569] In AOTI, FPs or CEPs comprise one or more T cell antigens. In AOTI, an expression of an effective amount of a fusion protein of the invention will result in the detectable or significant expansion in population, increase in activity, or both, of one or more types of T cells that are specific for one or more antigens contained in, expressed with, or otherwise associated with the expression of the fusion protein in a composition comprising competent T cells. T cell antigens incorporated in a fusion protein or other expression product of the invention can target any suitable receptor on any suitable type of T cells, having any suitable characteristics or lineage(s). Examples of specific types of T cells include, e.g., TH1 and TC1 cells.

[0570] T cells have been extensively studied and characterized and are only briefly described herein and without limiting the scope of such cells. In general, T cells are lymphocytes that comprise a T-cell receptor on the cell surface. Differentiated T cells (antigen-specific T cells) typically recognize a limited number of epitopes (typically 10s to 100s of structurally related compounds), though some T cells, such as lipid-recognizing CD1-restricted T cells can recognize classes of compound comprising numerous types of compounds within such a class. T cells typically emerge as precursor cells (e.g., CD4−CD8−/double negative T cells), develop into immature/undifferentiated T cells (typical immature T-cells display both CD4 and CD8 proteins (i.e., such cells are CD4+8+ cells)) and further develop into several distinct types of mature T cells, which when exposed to antigens can become antigen-specific T cells. In general, a fusion protein or expression product of a construct can comprise one or more antigens that react with any suitable type of T cell, including immature T cells, differentiated/mature T cells, or both types of T cells. Typically, expression of fusion proteins of the invention will promote, induce, or enhance a detectable or significant response in one or more types of mature/differentiated T cells, lead to a detectable or significant increase in the amount of such T cells, or both.

[0571] Differentiated T cells provide distinct immunity-related functions, such as T cell-mediated cell death, carried out by T cells in several ways. CD8+ T cells, also known as “killer cells”, for example, are cytotoxic, having the ability to directly targeted cells, to signal other immune cells, or perform both functions. CD4+ T cells, function as “helper cells,” indirectly killing targeted cells. Regulatory T cells (sometimes also referred to as “suppressor T cells”) are involved in immune tolerance, preventing immune cells from mounting a response against cells recognized as “self.” Antigen-naïve T cells expand into antigen-specific T cells. Antigen-specific T cells can be classified as being either “memory T cells” or “effector T cells.” Ag(s) can induce IR(s) in any such TCs.

[0572] Numerous types of memory T cells are known including tissue-resident memory T (Trm) cells, stem memory TSCM cells, and virtual memory T cells. All such memory T cells appear to be relatively long-lived and can quickly expand to large numbers of effector T cells upon re-exposure to their cognate antigen. By this mechanism they provide the immune system with “memory” against previously encountered pathogens. Memory T cells may be either CD4+ or CD8+. Central memory T cells (TCM cells) express CD45RO, C-C chemokine receptor type 7 (CCR7), and L-selectin (CD62L) (or homologs thereof), and also have intermediate to high expression of CD44. Effector memory T cells (e.g., TEM cells and TEMRA cells) typically express CD45RO, typically have high/medium expression of CD44, and typically lack expression of lymph node homing receptors, CCR7, and L-selectin (or exhibit corresponding presence/lack of homologs thereof). TEMRA stands for terminally differentiated effector memory cells re-expressing CD45RA, a marker also present on naive T cells. Tissue resident memory T cells (TRM) occupy tissues (skin, lung, etc.) without recirculating and are associated with the marker αeβ7, aka CD103. Virtual memory T cells differ from the other memory subsets in that they do not originate following a strong clonal expansion event & individual virtual memory T cell clones typically reside at relatively low frequencies in organisms. CEPs can induce IRs related to any thereof.

[0573] In AOTI, FPs/CEPs generate DOS enhanced number(s) of antigen-specific memory T cells when expressed in effective amounts in an immunocompetent alphaherpesvirus infectable subject vertebrate or a population thereof, result in enhanced immunological memory to the antigens in or otherwise associated with expression of the fusion protein, or both. Such an increase in memory T cells can be in any suitable type of memory T cell, a combination of memory T cell types, or in memory T cells as an overall class of cells. In AOTI, the expression of the fusion protein results in detectably more or significantly more antigen-specific memory cells or other aspects of improved immunological memory than the corresponding peptide antigen or a fusion protein lacking all of the features of the expressed fusion protein or associated construct (e.g., a construct comprising an expression enhancing intron and associated coding sequence encoding a gD:antigen fusion protein comprising one or more antigens associated with one or more ubiquitin sequences and both MHC I and MHC II antigens will result in an improved memory response as compared to a corresponding amount of a construct encoding a gD:antigen fusion protein comprising only either the MHC I or MHC II antigen, lacking the ubiquitin sequence(s), or lacking the expression-enhancing intron sequence). Additional aspects of immunological memory effects associated with compositions and methods of the invention are described further below. The enhanced immunological memory effects of CEPESCs is one of the surprising properties of the inventive compositions and methods provided herein.

[0574] T cells also broadly can include Innate-like T cells (e.g., Natural killer T cells (NKT cells), Mucosal associated invariant (MAI) T cells), and Gamma delta T cells). In AOTI, such T cells are outside of the scope of the T cells impacted by, targeted by, or impacted and targeted by the compositions and methods of the invention. However, in other aspects, such T cells are included within the scope of T cells impacted by, targeted by, or impacted and targeted by methods and compositions of the invention. Disclosures related to T cells herein should be understood to simultaneously provide support for application to both these broader and narrower range of T cells.

[0575] Most T-cells typically respond to antigen only when it is displayed on specific classes of other cells known generically as an antigen-presenting cells (APCs). APCs, e.g., macrophages and dendritic cells, present antigens derived from polypeptides via glycoproteins, known as MHC (major histocompatibility complex) proteins, which are displayed on the surface of APCs. As noted above, the nomenclature for MHC gene products varies from species to species. For example, human MHC proteins are also referred to as human lymphocyte antigens (HLA), murine MHC proteins are also referred to as H-2 antigens, and rat MHC proteins are called RT1 antigens.

[0576] As noted EH, typically CD8+ T lymphocytes recognize MHC class I complexes, while CD4+ cells recognize MHC class II complexes on APCs. In MHC-mediated presentation of Ags, the α:β T-cell antigen receptor recognizes peptide Ags with MHC molecules. Particular MHC proteins bind selected classes of antigens with limited specificity. Typical determinants in a TCR:Ag:MHC complex are (1) the unique sequences of the variable portion of the TCR and (2) the unique sequences of antigen/epitope. However, to some degree, MHC-presented oligopeptide antigens are embedded within an MHC molecule and TCR recognition of antigen only occurs within the context of an appropriate class of MHC molecule (a phenomenon known as MHC restriction). The involvement of CD8 and CD4 in Ag recognition by α:β TCRs can be significant. CD4 and CD8 molecules can increase the avidity of the TCR interaction Ag:MHC complexes and, accordingly, are sometimes referred to as co-receptors.

[0577] In addition to the above-described classical MHC class I molecules (also known as “MHC class Ia” molecules), numerous non-classical MHC class I molecules (also known as “MHC class Ib” molecules) exist. MHC class Ib molecules. Some class Ib molecules, e.g., HLA-E in humans and H-2M3 bind peptide antigens, whereas others such as CD1 (cluster of differentiation-1) and MR1 (MHC-related protein-1) bind non-peptide antigens. Both αβ and γδ T cells recognize class Ib molecules (e.g., MR-1, HLA-G, or HLA-F, and others already mentioned above). Such T cells can be characterized as “unconventional,” because they recognize lipids, metabolites, and modified peptides and produce innate immune cell-like rapid effector responses. Nonclassical class II molecules, HLA-DM and HLA-DO, are non-peptide binding class II MHC-II homologs, that function to edit the peptides presented by MHC class II molecules. Most, but not all, nonclassical MHC molecules have known interactions with T cells or NK cells. Biology of these and several other nonclassical MHC molecules, particularly CD1 molecules/processes, and associated T cell types (e.g., iNKT cells, dNKT cells, Gamma delta T cells (γδ T cells), and the like) is discussed in, e.g., D'Souza M P et al. PLoS Pathog. 2019; 15(2):e1007567. doi:10.1371/journal.ppat.1007567; Pereira C S et al. Immunity. J Immunol Res. 2016; 2016:2876275. doi:10.1155/2016/2876275; Kaczmarek, R. et al. Arch. Immunol. Ther. Exp. 65, 201-214 (2017). https://doi.org/10.1007/s00005-017-0461-y; Van Kaer L et al Trends Immunol. 2016; 37(11):738-754. doi:10.1016/j.it.2016.08.011; Ulrichs T et al. Infect Immun. 2003; 71(6):3076-3087. doi:10.1128/iai.71.6.3076-3087.2003; and U.S. Pat. No. 7,063,844. In AOTI, a fusion protein of the invention will also or alternatively comprise one or more antigens that lead to effective non-classical MHC I Ag presentation. Expression of CD1 mediate peptides has been demonstrated in, e.g., Liu Y et al. J Clin Invest. 2011; 121(1):249-264. doi:10.1172/JCI43964 and Lee D J et al. J Exp Med. 1998; 187(3):433-438. doi:10.1084/jem.187.3.433. In aspects, FPs comprise sequence(s) that promote/enhance synthesis of antigenic lipid(s), carbohydrate(s), or glycolipid(s) in TR(s), resulting in a non-classical MHC response. In other aspects, CEPESCs lack any non-classical MHC interacting EP ES(s).

[0578] In AOTI, T cell antigens of FP(s)/CEPs comprise, PC, GCO, or consist only of ≥1 Th (CD4+)/MHC II antigens, one or more CD8+/CTL/MHC I antigens, or a combination of one or more of each such type of T cell antigen.

[0579] T cell antigens in FPs/CEPs can be associated with DOS promotion or enhancement any suitable type of T cell Ag-associated IR(s). E.g., inclusion of 1+ T cell Ag(s) in FP(s) result in DOS increases in T cell production of interferon-γ (IFNγ), transforming growth factor-β, IL-4, IL-5, IL-13, IL-17A, IL-17F, IL-21, IL-22 or CT. In AOTI, at least one T cell antigen of FPs or Ag EPs is an Ag that induces IR(s) in a regulatory T cell, a follicular T cell, or both. In AOTI, delivery of an effective amount of CEPESC(s) results in DOS higher number of epitope-specific CD8+ T cells in a TR, cell, or population.

### (a) MHC I/CD8+ Epitopes

[0580] In AOTI, FPs/CEPs comprise 1+ MHC I epitopes. As noted above, terms such as “MHC I” herein are meant to encompass all homologs of MHC I molecules present in a species (e.g., HLA in humans). In AOTI, OSMGAOA MHC I epitopes in FP(s) comprise a continuous (linear) AARS of about 8 to about 11 amino acids in length. In AOTI, the MHC I antigen detectably or significantly increases CD8+ T cell activity, such as CTL cytotoxicity. In AOTI, one, some, most, generally all, or all of the MHC I epitopes will bind one or more MHC I molecules with sufficient affinity to promote, induce, or enhance a MHC I-associated immune response (examples of suitable binding affinities for MHC I molecules and epitopes and related techniques/principles useful in the selection of Ag sequences and associated sequences are described in, e.g., Sette A et al. J Immunol. 1994 Dec. 15; 153(12):5586-92 and Berzofsky J A et al. Nat Rev Immunol. 2001 December; 1(3):209-19). In AOTI, one, some, most, generally all or all of the MHC I antigens of a fusion protein are associated with one or more PTPSs, such as one or more polyUb sequences. In AOTI, the inclusion of the PTPS detectably or significantly enhances the MHC I processing of one or more antigens of the fusion protein. In AOTI, the one or more NAMs comprising MHC I epitope-encoding sequences of a composition are associated with a transfection promoting agent, such as a calcium phosphate nanoparticle, which also or alternatively detectably or significantly enhances MHC I processing of one or more Ags encoded by such NAMs, MHC II processing of one or more such Ags, or both. In AOTI, FP(s) comprise ≥1 FP(s) comprising MHC I Ags and one or more HVEM-binding sequences, such as one or more gD HVEM-biding fusion proteins comprising one or more MHC I epitopes, wherein the inclusion of the HVEM-binding sequence also or alternatively detectably or significantly enhances MHC I processing of some, most, or all of the associated MHC I Ags.

[0581] In AOTI, CEPESCs comprise NS(s) encoding ≥1 gDAgFP and ≥1 Ags optimized for expression in a HVEM-expressing host, and (a) the host is not CI immunosuppressed when the method is performed (e.g., the method is performed to provide an immunization effect in the host), (b) no CTL for SMGAOA of the Ags exist in the TR prior to administration, or (c) both situations exist in the host, wherein the administration of an EA of the CEPESC results in an effective MHC I response, such as a significant MHC I Ag-specific response to OSMGAOA of the encoded Ags. In one aspect, CEPESCs comprise TFA(s), such as a CaPNP, an ITICSTAP (e.g., an EAT-2 polypeptide), one or more Ag-associated PTPSs, or a combination of any or all thereof. In one such aspect, the MHC I response is DOS greater in whole or at an Ag-specific level as compared to a corresponding composition lacking such additional features.

[0582] FPs/CEPs can comprise one or more confirmed MHC I antigens, one or more predicted MHC I antigens, or a combination thereof (typically in combination with one more confirmed MHC II antigens, one or more predicted MHC II antigens, or both). In AOTI, one or more expected/predicted MHC I or MHC II antigens will be identified through one of the epitope identification methods described below. In AOTI, a predicted MHC I or MHC II antigen will comprise a portion of an antigenic protein or a protein from a disease-causing agent, which typically comprise one or more aromatic amino acid residues, e.g., one or more Phe or Trp residues, one or more Lys or Met residues, or both. In AOTI, a predicted MHI epitope comprises 1, 2, or 3 aromatic AAs (e.g., Phe residue or Phe or Trp residues) or 1+ Met/Lys residues, positioned within position 4, 5, 6, or a combination of any or all thereof, in an expected MHC I T cell epitope sequence (i.e., the predicted MHC I Ag will have a structure according to the formula Xaa(a)-Xaa4-Xaa5-Xaa6-Xaa(b), wherein Xaa(a) comprises 1-3 of any AAs, Xaa(b) comprises 2-5 of any AAs, and at least one of Xaa4, Xaa5, and Xaa6 (if not 2 or 3 thereof) are Trp, Phe, Met, or Lys.

[0583] In AOTI, FPs/CEPs will comprise one or more MHC I epitopes that are ≥11 AAs in length (non-canonical MHC I epitopes). Examples of such MHC I epitopes are KITA (SFE Josephs T M et al. Biol Chem. 2017; 398(9):1027-1036. doi:10.1515/hsz-2016-0305). In AOTI, FPs/CEPs comprise at least one MHC I antigen or predicted antigen of less than about 11 amino acid residues, at least one confirmed non-canonical MHC I epitope, or both. In AOTI, a fusion protein comprises at least one long predicted/known T cell antigen (a sequence of over 30, over 40, or over 50 amino acid residues), at least one short known/predicted antigen, or both. In AOTI, a fusion protein comprises a long predicted/known antigen and such antigen is processed through antigen cross-presentation. In AOTI, inclusion of a long antigen results in a detectably or significantly faster T cell response, enhanced dendritic cell processing of the fusion protein, or both. The observation of such responses and related principles, methods, and compositions are described in, e.g., Zhang H et al. J Biol Chem. 2009 Apr. 3; 284(14):9184-91; Rosalia R A et al. Eur J Immunol. 2013 October; 43(10):2554-65; and Rosario M et al. Eur J Immunol. 2010 July; 40(7):1973-84). Examples of larger Ag sequences, derived from viral ORFs and expected to comprise one or more T cell epitopes, are provided below. FPs comprising these and other Ags that induce MHC I cross-presentation are DEH.

[0584] In AOTI, FPs/CEPs comprise multiple MHC I antigens (e.g., at least 2, 3, 4, 5, 7, 8, 10, or more MHC I antigens), a composition will comprise nucleotide sequences encoding multiple MHC I antigens, or both, where such multiple MHC I antigens are sufficiently different from each other to be expected or are known to induce a different profile of immune response in different individuals of a population/species. For example, such antigens may exhibit less than about 60%, less than about 45%, less than about 33%, or less than about 20% identity to each other. In such an aspect, the inclusion of such multiple MHC I antigens can detectably or significantly result in a larger proportion of a population exhibiting an immune response to one, some, most, generally all, or all of the MHC I antigen sequences in the fusion protein.

[0585] In aspects, FPs/CEPs will comprise one or more promiscuous MHC I antigens (which detectably bind one or more types of MHC I molecules). In AOTI, the fusion protein will comprise one or more MHC I antigen “supermotifs” that bind a number of common MHC I molecules high affinity. Such supermotifs are known in the art (SFE Sydney J. et al. Immunol Today. 1996 June; 17(6):261-6; WO1997033602; and Tang Y, et al. Immunol Invest. 2003; 32(1-2):31-41. doi:10.1081/imm-120019206. Prediction methods for identifying T cell antigen supermotifs also are known (SFE Doytchinova I A et al. Methods. 2004; 34(4):444-453. doi:10.1016/j.ymeth.2004.06.007). In AOTI, the fusion protein will comprise one or more promiscuous (or “universal” or “broad-range”) epitopes, which bind to a substantial fraction of a particular class of MHC molecules in an animal species or population. Such epitopes also are known in the art (SFE U.S. Pat. Nos. 6,143,935; 6,143,517; 6,689,363, 8,168,201; as well as US20040258660 and US20020076416. Methods for the prediction of promiscuous MHC I epitopes, allowing for incorporation of putative promiscuous epitopes in FPs, also are known. SFE Waheed Y et al. Asian Pac J Trop Med. 2017; 10(8):760-764. doi:10.1016/j.apjtm.2017.07.023; Subramanian N et al. Asian Pac J Cancer Prev. 2013; 14(7):4167-4175. doi:10.7314/apjcp.2013.14.7.4167; Shehzadi A et al. Virol J. 2011; 8:55.doi:10.1186/1743-422X-8-55; & Dar H et al. Asian Pac J Trop Med. 2016; 9(9):844-850. doi:10.1016/j.apjtm.2016.07.004

### (b) MHC II/CD 4+ Epitopes

[0586] In aspects, FPs/CEPs comprise at least one MHC II T cell epitope. In AOTI, fusion proteins of the invention, such as gD:Ag fusion proteins, will comprise at least one MHC II antigen and at least one MHC I antigen. In AOTI, the MHC I and MHC II antigen of a fusion protein promote, induce, or enhance an immune response against the same disease-causing agent or type of disease-causing agent in a target species, subject, cell type, etc.

[0587] MHC II molecules typically are expressed only on the surface of antigen-presenting cells (macrophages, dendritic cells, and B cells). MHC II molecule presentation is typically the primary way in which exogenous antigens are presented to T cells. Typically, CD4+ T cells respond with immune cell proliferation, cytokine production, or both. Accordingly, a DOS exhibition of either or both IRs is a characteristics of FPs expressed by CEPESCs.

[0588] FPs/CEPs can include confirmed MHC II epitopes, putative MHC II epitopes, or a combination thereof. In AOTI, the fusion protein comprises one or more putative MHC II epitopes, which can be, e.g., predicted epitope sequences or larger antigenic sequences known or expected to give rise to an MHC II response. In AOTI, a putative MHC II epitope sequence is provided which is known or predicted to be a surface exposed antigen sequence. In AOTI, a putative MHC II epitope sequence AOA comprises a coiled secondary structure (methods of secondary structure prediction and assessment are KITA and DEH) or will lack any secondary structure. In AOTI, a putative MHC II epitope sequence comprises one or more aromatic amino acid residues, one or more residues selected from Lys and Met, or a combination of either thereof. Typically, such sequences and known MHC II Ag sequences are linear sequences. In AOTI, a MHC II antigen or putative MHC II antigen is known to be or comprises 1+ AAs associated with a neutralizing Ab epitope. In AOTI, a putative or known MHC II Ag has a relatively lower level of glycosylation (below average or significantly less than), other homologous amino acid sequences, or lacks any known glycosylation or potential glycosylation sites.

[0589] In AOTI, CEPs/FPs comprise multiple MHC II antigens, multiple putative MHC II antigens, or a combination thereof. In AOTI, FPs/CEPs will also or alternatively (typically also) comprise multiple MHC I antigens, multiple putative MHC I antigens, or a combination thereof. In AOTI, one, some, most, generally all, or all of such Ags are associated with (a) a linker sequence, e.g., a medium linker (of at least four residues, a flexible linker, a linker comprising a glycosylation site, a cleavable linker, a linker comprising a cleavage site (e.g., a 2A site), or a linker that comprises a combination of any or all such characteristics), (b) an intracellular targeting sequence (e.g., a PTPS, an ERTPS, or an exosome-targeting sequence, or a combination thereof, and In AOTI, at least one, some, most, or all of the Ags are associated with at least one PTPSs, such as at least one polyUb), or (c) both. In AOTI, such multi-MHC I antigen, MHC-II antigen, or MHC I and MHC II antigen fusion proteins induce DOS IR(s) in a larger proportion of a population of a species or exhibit a greater or significantly greater response in a population, which may be due to the variability of different MHC molecules in populations.

[0590] In aspects, a CEP/fusion protein comprises one or more promiscuous/universal MHC II epitopes, MHC II supermotifs, or both (knowledgeable readers will recognize that there can be overlaps between such sequences). In AOTI, a CEP/FP comprises one or more promiscuous MHC I epitopes or MHC I supermotifs and one or more promiscuous MHC II epitopes or supermotifs, or antigenic variants of either or both thereof. MHC II promiscuous epitopes and methods for predicting such epitopes are exemplified in, e.g., Kashyap M et al. Infect Genet Evol. 2017; 53:107-115. doi:10.1016/j.meegid.2017.05.022; Grabowska A K et al. Int J Cancer. 2015; 136(1):212-224. doi:10.1002/ijc.28968; and Rosa D S et al. Arch Immunol Ther Exp (Warsz). 2010; 58(2):121-130. doi:10.1007/s00005-010-0067-0. MHC II supermotifs are exemplified in, e.g., Malcherek G et al. J Exp Med. 1995; 181(2):527-536. doi:10.1084/jem.181.2.527; Sinigaglia F, et al. J Exp Med. 1995; 181(2):449-451. doi:10.1084/jem.181.2.449; and Morse HC. Immunol Today. 1996; 17(1):47-48. doi:10.1016/0167-5699(96)80569-x. In AOTI, FPs comprising one or more MHC I epitopes and MHC II epitopes will also result in a humoral response that is at least partially attributable to one or more of the T cell epitopes of the fusion protein. In aspects, CEPs/FPs lack any BCEs but still results in a DOS enhancement of a humoral response to the DCA associated with the T cell antigens in the fusion protein/CEP.

[0591] As noted already herein, in one aspect antigen(s) of CEP(s) are sized optimized to enhance MHC I, MHC II, or both MHC I and MHC II IR(s). Whole protein Ags have been, e.g., determined to be associated with slower, lower, or both slower and lower IR(s) than short epitope-sized Ag sequences and mid-sized epitope comprising sequences and mid-sized sequences have been demonstrated to produce enhanced, faster, or enhanced and faster immune responses in some contexts (e.g., an Ag sequence of about 15-60, about 15-45, about 15-30, about 20-50, about 20-45, about 20-40, or about 20-30. Such principles are described in, e.g., Rabu C et al. Oncoimmunology. 2019; 8(4):e1560919. doi:10.1080/2162402X.2018.1560919.

[0592] In still another aspect, FPs/CEPs comprise Ag(s) that comprise one or more overlapping epitopes. In AOTI, FPs/CEPs comprise an antigenic sequence that comprises overlapping MHC I and MHC II epitopes. Examples of such overlapping epitope sequences are known in the art (SFE Lohia N et al. Viral Immunol. 2014; 27(5):225-234. doi:10.1089/vim.2013.0135; Bristol J A et al. Cell Immunol. 2000; 205(2):73-83. doi:10.1006/cimm.2000.1712; and Fayolle C, et al. J Immunol. 1991; 147(12):4069-4073).

[0593] Various AOTI comprise particular types of Ags being contained in FPs/CEPs. Description of the use of antigenic sequences provides implicit support for the Ags in compositions and vice versa.

### (c) Cross-Presentation Facilitatinci TEs

[0594] In AOTI, FPs/CEPS comprise one or more MHC II antigens that are also or alternatively cross-presented as MHC I antigens. In AOTI, FP EPS comprise one or more DCRTSs. In AOTI, such a fusion protein comprises one or more DCRTSs that target plasmacytoid dendritic cells, conventional dendritic cells (CDC1 cells, CDC2 cells, or both), or both types of DCs. In AOTI, such a fusion protein binds DEC-205. In AOTI, such a fusion protein is a DEC-205-binding multimeric trap comprising multiple Ag containing polypeptide monomers. In AOTI, the DCRTS also or alternatively targets CD40, CD11c, or both. In AOTI, such a fusion protein does not bind DEC-205. In AOTI, such a fusion protein is significantly taken up and processed by CDC2 dendritic cells. In AOTI, a nucleotide sequence of a composition encoding such a fusion protein also encodes a co-stimulatory CD40L or other DC/T cell stimulatory factors, such as an ITII, e.g., an EAT-2 polypeptide. In AOTI, the cross-presenting T cell antigen results in a detectably or significant enhancement of an immune response against a disease-causing agent in one or more aspects. Principles and methods relating to the design of cross-presenting Ag constructs are provided in, e.g., Tan A C et al. Immunol Cell Biol. 2013 January; 91(1):96-104. Other elements for promoting cross-presentation of Ags adaptable to FP EPs, include incorporation of a phosphatidylserine-binding domain, described in US20190218260, and M1, which is a modified version of the superantigen streptococcal mitogenic exotoxin Z-2, described in Dickgreber N, et al. J Immunol. 2009; 182(3):1260-1269. doi:10.4049/jimmunol.182.3.1260.

### (d) TH-Type Specific TCEs

[0595] In aspects, CEPs comprise CD4 epitopes that are CB the type of CD4/TH T-cell IR they primarily induce. The abbreviations Th1 (T helper cell type 1) and Th2 (T helper cell type 2) T cells and such CD4 cells are KITA.

[0596] In aspects, OSMGAOA CD4 TCEs in CEPs are Th1 TCEs (in aspects, OSMGAOA TCEs are Th1 CD4 TCEs). In aspects, OSMGAOA CD4 TCEs are Th2 TCEs (in aspects OSMGAOA TCEs are Th2 TCEs). In aspects, OSMGAOA CD4 TCEs in CEPs are Th17 TCEs (in aspects, OSMGAOA TCEs in CEPs are Th17 TCEs). In aspects, CEPs comprise 1+, 2+, 3+, 4+, or 5+ Th1 TCEs; 1+, 2+, 3+, 4+, or 5+ Th2 TCEs; or 1+, 2+, 3+, 4+, or 5+ Th17 TCEs (e.g., in aspects, CEPs comprise 1+ Th1 TCE(s) and 1+ Th2 TCE(s)). In aspects, OSMGAOA of such TCEs induce IRs against the same type of DCA or same DCA. In aspects, 1+ of such TCEs are contained in gDAgFP(s). In aspects, 2+ Th1 TCEs, 2+ Th2 TCEs, or CT are contained in gDAgFP(s). In aspects, CEPs comprise gDAgFP(s) comprising PE(s) comprising 1+ Th1, 1+ Th2, or 1+ Th17 TCEs. In aspects, gDAgFP(s) in CEPs comprise 2+ Th1, Th2, or Th17 TCEs. In aspects, gDAgFP(s) comprise 2+ of Th1, Th2, and Th17 TCEs. In aspects, gDAgFP(s) comprise a mix of 2+ of Th1, Th2, and Th17 TCEs, and ≥2 of at least one of such type(s) of TCEs. In aspects, such PEs comprise MSL(s), FL(s), or MSFL(s), or self-cleavage site(s). In aspects, 1+ of any such Th-type specific TCE(s) in CEPs are associated with ITS(s), such as PTPS(s), such as polyUb(s). In aspects, 1+, 2+, 3+, or more of such TCEs are AgVs, such as GSRAgVs. In aspects, OSMGAOA of such TCEs are anti-cancer TCEs. In aspects, OSMGAOA of such TCEs are anti-pathogen TCEs. In aspects, CEPs include Th17 TCE(s) & SMGAOA of the TCEs are anti-cancer TCEs or anti-fungal TCEs. In aspects, OSMGAOA CD4 TCEs/TCEs are Th2 TCEs and SMGAOA of such TCEs induce IRs against extracellular parasites, such as works/nematodes, such as helminth(s).

[0597] Methods of mapping/differentiating Th1, Th2, and Th17 epitopes are known in the art, as our constructs, such as PEs, that exhibit mixes of such epitopes. Examples of such methods and constructs that can be adapted to these aspects are described in, e.g., Tatsumi T et al. J Exp Med. 2002; 196(5):619-628. doi:10.1084/jem.20012142; Cervi L, et al. J Immunol. 2004; 172(4):2016-2020. doi:10.4049/jimmunol.172.4.2016; Satoh R et al. Microbiol Immunol. 2010; 54(12):726-733. doi:10.1111/j.1348-0421.2010.00275.x; Watt W C et al. Semin Immunopathol. 2017; 39(3):245-253. doi:10.1007/s00281-016-0596-7; Tanaka M et al. Clin Cancer Res. 2011; 17(16):5392-5401. doi:10.1158/1078-0432.CCR-10-3083; Fraser D G, et al. Immunogenetics. 2003; 55(7):508-514. doi:10.1007/s00251-003-0600-y; Zhu F et al. 2005; 23(27):3572-3580. doi:10.1016/j.vaccine.2005.01.157; Li X et al. Intervirology. 2015; 58(6):403-412. doi:10.1159/000445059; Yin D et al. Immunol Lett. 2016; 175:1-7. doi:10.1016/j.imlet.2016.04.016; Thema N et al. Mol Immunol. 2019; 107:106-114. doi:10.1016/j.molimm.2018.12.012; Yu W et al. Microb Pathog. 2017; 112:30-37. doi:10.1016/j.micpath.2017.09.045; Kuipers K et al. Infect Immun. 2017; 85(10):e00281-17. doi:10.1128/IAI.00281-17; U.S. Pat. No. 9,795,661; and US20180170997. Such epitopes and methods can be incorporated/adapted into these aspects of the invention.

[0598] In methods, one or more steps are taken to enhance Th1, Th2, or Th17 IRs. In aspects, one or more steps are taken to control Ag levels in TRs to promote such IRs. E.g., low or high Ag dosages of low affinity TCEs can promote Th2 responses, whereas moderate Ag expression levels promote Th1 IRs. Low or high doses of high affinity TCEs can promote Th1 IRs and mid-level dosages of low affinity TCEs can promote Th2 IRs. These and other factors that can promote polarization towards one type of Th response are known (SFE Kaiko G E et al. Immunology. 2008; 123(3):326-338. doi:10.1111/j.1365-2567.2007.02719.x; Rogers P R et al. J Immunol. 2000; 164(6):2955-2963. doi:10.4049/jimmunol.164.6.2955; Brandt K et al. Scand J Immunol. 2002; 56(6):572-579. doi:10.1046/j.1365-3083.2002.01170.x; and Rogers P R et al. J Immunol. 1999; 163(3):1205-1213.

[0599] In aspects, methods comprise delivery of cytokines or cytokine-expressing NAMs to TRs to promote Th-specific IRs. In aspects, IL-12, IFN PPTs, IL-18, II-27, CD80, ICAM-1, or combinations are delivered to promote Th1 IRs (either as PPTs or via NAMs comprising related coding sequence(s)). In aspects, IL-4, IL-6, IL-11, CD2, CD86, or combinations are delivered/expressed to promote Th2 IRs. In aspects, protein kinase C (PKC) and calcium levels are modulated to promote Th1 or Th2 IRs. In aspects, calcineurin inhibitor(s) are administered/expressed to promote Th2 IRs. In aspects, IL-6 or TGF-β is/are expressed or delivered to promote Th17 IRs (in aspects, IL-23 also or alternatively is administered/expressed to promote Th17 IRs). In aspects, inhibitors of cathepsin B are administered/expressed to promote Th1 IRs. More generally, known factors that promote Th-specific responses are administered with related Th specific TCE(s). In aspects, MHC II trafficking signal(s) are delivered with Th1/Th2 TCEs (see WO2019071032).

[0600] In methods, two or more different CEPESCs are administered to TRs, in one of which the CD4 TCEs or TCEs PCGCOSCO or CO Th1 TCEs against a DCA or group of related DCAs, and at least one other of which the CD4 TCEs or TCEs PCGCOSCO or CO Th2 TCEs against a DCA or group of related DCAs. In aspects, delivery of the second CEPESC(s) in such a method is an optional step, depending on CEs in the TR(s) receiving the first CEPESC(s). In aspects, such methods are used to treat cancer & one/both reduce tumors.

[0601] In aspects, CEPs comprise 1+ or 2+ Th2 TCEs and IRs comprise DOS enhanced production of IL-4, IL-5, IL-6, IL-10, or IL-13, or combinations. In aspects, CEPs comprise 1+ or 2+ Th1 TCEs and IRs comprise DOS enhanced IFNg expression, IL-2 expression, or both. In aspects, the delivery of a particular Th epitope type DOS enhances the level of memory T cells of that Th type in TRs (e.g., Th1 TCE CEPs DOS enhance related Th1 memory cells).

[0602] In aspects, CEPs PCGCOSCO or CO Th1 TCEs comprise or are AAW toll like receptor (TLR) modulators that induce IRs. In aspects, CEPs PCGCOSCO or CO Th2 TCES comprise or are AAW PRR modulators.

### 2) B cell Epitope Characteristics and BC ICRs

[0603] In AOTI, FPs/CEPs AOA comprises BCE(s). B cell epitopes contained in FPs/CEPs can be any suitable 1+ BCE(s). In AOTI, FP(s)/CEPs comprise 2+ BCEs. In AOTI, BCEs comprise linear B cell epitope(s). In aspects, BCEs of CEPs PC, SCO, or CO linear BCEs. In AOTI, CEP(s) comprise 1+ or 2+ non-linear/conformational (discontinuous) B cell epitopes.

[0604] In AOTI, CEPs comprise no known B cell epitopes. As discussed further below, in one aspect potential B cell epitopes of EP(s) are minimized through one or more modifications to the AARS thereof, such as through removal of one or more potential/known glycosylation sites from the antigen sequences, other functional sequences, or both. In aspects, EPs or CEPs lack BCEs but nonetheless DOS induce BC IR(s) in TR(s).

[0605] In AOTI, CEPESCs comprise 1+ putative B cell epitope-containing sequences. In AOTI, such a putative B cell antigenic sequence is from a surface exposed sequence, primarily comprises hydrophobic amino acids, or both. In another aspect such a putative B cell epitope also or alternatively reflects a predicted B cell epitope identified by 1+ BCE prediction methods, DEH.

### 3) Epitope Flanking Sequences

[0606] In AOTI, Ag AARS(s) comprise 1/2 flanking sequences that are positioned upstream or downstream of a known or predicted epitope, such as an MHC I epitope, MHC II epitope, or BCE. As noted, in one aspect an antigenic sequence is has a size that promotes an immune response, such as about 20-45, 20-40, or 20-35 amino acid residues. In one example, an antigenic sequence can comprise a core MHC I epitope of about 8-12 residues and an additional 10-30 amino acid residues. In another example, an antigenic sequence can comprise a core MHC II epitope of, e.g., 12-20 residues and about 5-25 flanking residues. In AOTI, the flanking sequences are identical or at least related (e.g., substantially identical or very related) to one or more native sequences flanking the antigen derived from the cognate protein of origin. Thus, for example, a fusion protein of the invention can comprise at least 2, 3, 4, 5, 6, 7, 8, 9, 10, 11, 12, 13, 14, 15, 16, 17, 18, 19, or 20 flanking residues, such as 2-30 flanking residues, 4-28 flanking residues, 4-24 flanking residues, or 5-20 flanking residues, which optionally are identical or substantially identical to corresponding flanking residues of the epitope or epitope-related sequence in a naturally occurring protein. In AOTI, the flanking residues are both upstream and downstream of the epitope. In AOTI, the presence of the flanking residues associated with an MHC II epitope detectably or significantly promotes MHC affinity, TCR recognition, or one or more aspects of the immune response. In AOTI, inclusion of flanking sequences of an MHC I epitope detectably or significantly enhances proteasomal processing, ER processing, T cell recognition, or any aspect of the immune response. In AOTI, an MHC I epitope sequence is about 20 amino acid residues or less. In AOTI, one or more antigenic sequences are at least about 20 amino acid residues. In AOTI, some, most, generally all, or all of the antigenic sequences of a fusion protein, encoded by nucleotide sequences of a composition, or both, are at least about 20 amino acids in length, such as between 20-100, between about 20-60, between about 20-45, or between about 20-35 amino acid residues in length. Related principles are described in, e.g., Luc Teyton. J Clin Invest. 2007; 117(11):3164-3166. https://doi.org/10.1172/JCI33997.

### 4) Polyepitope (PE) AARs/PPTs

[0607] As noted, in AOTI EPs (e.g., one or more gD:Ag fusion proteins) contain more than one Ag sequences, often three, four, five, six, seven, eight, ten or more separate and distinct Ag sequences (e.g., one or more gD:Ag fusion proteins can comprise 2-20, 2-16, 2-12, 2-10, 2-8, or 2-5 antigenic sequences, each of which comprising one or more epitopes). Such EPs can be described as “polyepitope” FPs. In AOTI, one, some, most, generally all, or all of the antigenic sequences of a polyepitope fusion protein are from different proteins of a DCA, different types of a DCA, or both. In AOTI, a polyepitope comprises two or more Ags that are non-heterologous. In one such aspect, such a polyepitope fusion protein can comprise two or more non-heterologous Ags that are associated with an induce an immune response against a single type of a DCA or a single DCA. Examples of DCAs are discussed further below. In AOTI, a polyepitope fusion protein comprises Ags against two or more types of DCAs. In AOTI, such Ags may be associated with different DCAs associated with a single disease (e.g., a cancer and a cancer-promoting virus, such as HPV). In AOTI, the polyepitope vaccine comprises one or more linkers (e.g., one or more mid-sized, flexible, or mid-sized and flexible linkers, such as GPGPG (SEQ ID NO:730), one or more intracellular targeting sequences (e.g., one or more PTPSs, such as one or more polyUb sequences), or both, associated with at least one, some, most, generally all, or all of the Ags in the polyepitope sequence. In AOTI, the polyepitope sequence comprises both MHC I and MHC II antigens. In AOTI, the polyepitope fusion protein detectably or significantly promotes, induces, or enhances CTL, Th, and B cell responses. In AOTI, the polyepitope comprises one or more variants of antigenic sequences (“antigenic variants”), such as variants in which glycosylation sites are removed. In AOTI, most, generally all, or all of the Ags are such variants.

[0608] Examples, techniques, and principles relating to polyepitope antigens that can in some aspects be applied to fusion proteins of the invention are described in, e.g., Zhang L. Cell Mol Immunol. 2018; 15(2):182-184. doi:10.1038/cmi.2017.92; Thomson S A et al. J Immunol. 1996; 157(2):822-826; Smith SG. Curr Opin Mol Ther. 1999; 1(1):10-15; Suhrbier A. Immunol Cell Biol. 1997; 75(4):402-408. doi:10.1038/icb.1997.63; and Livingston B. et al. J Immunol. 2002; 168(11):5499-5506. doi:10.4049/jimmunol.168.11.5499. Methods of designing polyepitope sequences also are being developed in the art and such methods can be applied to putative polyepitope fusion protein design (SFE Antonets D V et al. BMC Res Notes. 2013; 6:407. Published 2013 Oct. 10. doi:10.1186/1756-0500-6-407 and Patronov A et al. Open Biol. 2013; 3(1):120139. doi:10.1098/rsob.120139.

### 5) Epitope Identification and Prediction

[0609] In AOTI, a fusion protein or the expression product can comprise one or more antigenic proteins with unidentified epitopes or one or more putative antigens, e.g., one more amino acid sequences that are expected or predicted to comprise a MHC I epitope, MHC II epitope, B cell epitope, or combination of some or all thereof. Numerous methods and tools exist for identification of such epitopes exist in the art and, accordingly, only a limited, non-limiting list of exemplary principles and methods that can be used in the practice of the invention are described here.

[0610] At least three methods can be used to predict TCEs: (1) genetic methods, (2) motif prediction methods, and (3) immunoproteomic analysis methods. A putative TCE can be in one aspect identified by one, two, or all of these methods. In AOTI, a putative antigen is identified by immunoproteomic analysis. In AOTI, the putative antigen is a putative cancer antigen.

[0611] In a genetic approach, cDNA generated from one or more DCAs, such as one or more tumor cells, is introduced into APCs, resulting in their presentation in MHC molecules. Such methods are well known and have been practiced successfully for at least three decades. However, because such methods can lead to overestimation of antigenicity, or false negatives due to differences in cellular properties and processing of such sequences, such a method is in some respects combined with one or more other approaches in identifying putative epitope sequences for inclusion in a FP or EP.

[0612] A variety of immunoproteomic methods also are known in the art and any suitable immunoproteomic method or combination of such methods can be used to identify putative antigens. In AOTI, a putative antigen is also or alternatively identified through MHC molecule binding screening. For example, one or several overlapping synthetic peptides, which can for example span the entire sequence of an antigen of interest, can be screened for binding to MHC molecules, such as MHC II molecules. Screening may involve biophysical methods to measure MHC binding, T cell readout assays, or tetramer-guided epitope mapping. In AOTI, MHC-peptide complexes are isolated, bound peptides are eluted from the MHC molecules and analyzed by high-performance liquid chromatography (HPLC) fractionation, mass spectrometry, or both techniques. Quantitative mass spectrometry methods also or alternatively can be used to identify T cell epitopes. SFE Birkir Reynisson et al. https://doi.org/10.1101/799882doi: bioRxiv preprint.

[0613] Motif prediction uses algorithms to estimate how well peptides will bind to MHC molecules. These algorithms typically are based on patterns obtained from peptides known to bind MHC molecules with scores being assessed by evaluating specific anchor residues between the peptide and MHC binding groove. Motif prediction can have limited rates of success (in terms of false negatives, false positives, or both, particularly with hidden/subdominant epitopes). Such predictions can be improved by combining such analysis with other data points. For example, prediction can be further honed by examining potential proteasomal cleavage events in the parent protein. In AOTI, such a method is performed for MHC I epitope prediction, which tends to have a higher rate of success in computational approaches due to the better-defined pockets of MHC I molecules. Tools that currently are publicly available for such analysis include PREDIVAC (http://predivac.biosci.uq.edu.au/); Rankpep (http://imed.med.ucm.es/Tools/rankpep.html); PEPVAC (http://imed.med.ucm.es/PEPVAC/); SYFPEITHI (http://www.syfpeithi.de/); Vaxign (http://www.violinet.orq/vaxian/) MHCPred (http://www.dda-pharmfac.net/mhcpred/MHCPred/); EpiTOP (http://www.pharmfac.net/EpiTOP); TEPITOPE; EpiJen (http://www.ddq-pharmfac.net/epiien/EpiJen/EpiJen.htm); Propred (http://www.imtech.res.in/raahava/propred/); and Propred-1 (http://www.imtech.res.in/raahava/propred1/). Methods and principles relevant to TCE prediction/identification are further described in, e.g., Sanchez-Trincado J L et al. J Immunol Res. 2017; 2017:2680160. doi:10.1155/2017/2680160; Sadegh-Nasseri S. A. F1000Res. 2016; 5:F1000 Faculty Rev-1305. doi:10.12688/f1000research.7664.1; Comber J D, et al. Ther Adv Vaccines. 2014; 2(3):77-89. doi:10.1177/2051013614525375; Zhao L et al., Hum Vaccin Immunother. 2013 December; 9(12):2566-77; and Mettu R R et al. 2016; 432:72-81. doi:10.1016/j.jim.2016.02.013. In AOTI, such methods are applied to the identification/selection of putative TCEs for inclusion in CEPs/FPs.

[0614] Experimental and in silico methods for BCE identification also are KITA and can similarly be applied to sequences to similarly help qualify/limit potential/putative BCEs (sequential/linear, conformational, or both). Wet lab methods can be directly analytical or functional, similar to methods employed in T cell epitope analysis and often methods described in connection with one type of epitope identification can be modified to identify epitopes of the other type.

[0615] In AOTI, X-ray crystallography is applied, typically to an Ag:Antibody (“Ab”) complex, revealing conformational or linear B cell epitopes. Nuclear magnetic resonance (NMR) can similarly reveal information about the structure, dynamics, and binding energy of some Ag-Ab complexes. Electron microscopy (EM) or cryoelectron microscopy can also be used for epitope localization in some Ab:Ag complexes. Mass spectrometry methods also or alternatively can be applied to such complexes (e.g., limited proteolysis mass spec methods or epitope excision MS methods). The performance, and the strengths and limitations of NMR, EM/CM, MS, and crystallography methods for protein characterization are known and briefly discussed elsewhere herein.

[0616] Functional methods also can be used to map or aid in mapping potential B cell epitopes. Many methods for B cell epitope mapping can be divided into four main groups: competition methods, antigen fragmentation methods, modification methods, and methods using synthetic peptides or peptide libraries. Competition methods involve the use of multiple antibodies (“Abs”) against a particular target, to identify Abs that bind to the same epitope. Such methods are usually more helpful in identifying useful Abs, rather than in epitope mapping. Most functional epitope mapping methods are based on the ability to detect binding of antibody to antigen fragments, synthetic peptides, or recombinant antigens (including mutated variants, antigens arrayed by in situ cell-free translation, and/or expressed using selectable systems such as phage display). In typical binding assays, peptides are immobilized on solid support and binding of antibody is detected by western blot, dot blot, and/or ELISA (e.g., with peptide microarrays). Mutagenesis methods also can be applied to identify residues that make up part of an epitope (e.g., by substituting likely hot spot residues Tyr, Ag, and Trp with other residues, e.g., Ala or Gly, by other site-specific mutagenesis methods, by saturation mutagenesis, alanine mutagenesis, or any other suitable random mutagenesis technique). Such methods often involve display technologies, such as phage or yeast display methods.

[0617] A variety of computational approaches for B cell epitope identification also are available and can also or alternatively be used to identify/characterize putative B cell epitope sequences for inclusion in a gD:Ag fusion protein or other expression product. B-cell epitope databases include multifaceted database such as IEDB and AntiJen, B-cell oriented database such as BciPep, Epitome, and SDAP, and single pathogenic organism oriented database such as the HIV Molecular Immunology Database, FLAVIdB, and Influenza Sequence and Epitope Database. Examples of tools for continuous BCE prediction based on such databases & other predictive algorithms/methods include ABCPred (http://www.imtech.res.in/raghava/abcpred/LBepiPred (http://www.cbs.dtu.dk/services/BepiPred_LBtope (https://webs.iiitd.edu.in/raghava/lbtope/protein.php); IEDB (http://tools.iedb.org/bcell/); & SVMTriP (http://sysbio.unl.edu/SVMTriP/prediction.php). Tools available for conformational B cell epitope prediction, sometimes based on structural information (PDB/PDB ID files), include DiscoTope (http://www.cbs.dtu.dk/services/DiscoTope-2.0/); BePro (http://pepito.proteomics.ics.uci.edu/); Ellipro (http://tools.immuneepitope.org/ellipro/); Epitopia (http://epitopia.tau.ac.il/); SEPPA (http://bidd2.nus.edu.sg/SEPPA3/); EpiPred (http://opig.stats.ox.ac.uk/webapps/newsabdab/sabpred/epipred/); PEASE (http://www.ofranlab.org/PEASE); and CBTOPE (http://crdd.osdd.net/raghava/cbtope/submit.php). Bioinformatics tools for conformational B-cell epitope prediction using mimotopes include PEPITOPE (http://pepitope.tau.ac.il/) and MIMOX (http://i.uestc.edu.cn/mimox/). Other approaches are based on the Kolaskar and Tongaonkar scale, such as the methods implemented by the commercially available GCG and EMBOSS packages. These various approaches and related PMCs are described in, e.g., Sanchez-Trincado J L et al. J Immunol Res. 2017; 2017:2680160. doi:10.1155/2017/2680160; Potocnakova L et al. J Immunol Res. 2016; 2016:6760830. doi:10.1155/2016/6760830; Haste Andersen P et al. Protein Sci. 2006; 15(11):2558-2567. doi:10.1110/ps.062405906; & Cangzhi Jia et al. Current Bioinformatics. Vol 14, Iss. 3, 2019. DOI: 10.2174/1574893613666181112145706. Any one or combination of such approaches can be applied to identify/characterize putative BCEs.

[0618] From the preceding paragraphs it will be clear that the invention also provides methods of screening antigens for development of gD:Ag fusion protein-encoding constructs and related compositions expressing various expression products. For example, one such method can comprise (a) providing a number of putative Ag sequences; (b) subjecting the putative Ag sequences to one, two, three, or more of the above-described analytical methods and selecting sequences with favorable results from such one, two, three or more methods; (c) preparing nucleotide sequences encoding such putative Ags and incorporating such sequences into a composition of the invention to be expressed in a gD:Ag fusion protein or other expression product expressed with a gD:Ag fusion protein. In AOTI, some, most, or all of the putative Ag amino acid sequences are mid length sequences (e.g., about 25-45 or 25-30 residues in length); the putative Ag amino acid sequences comprise putative MHC I and MHC II Ags; the putative Ag amino acid sequences are expressed with one or more known Ag sequences; the method comprises modifying the putative Ag to obtain an editope or Ag variant (such as a deglycosylation variant); one some or all of the putative Ags are associated with an intracellular TS, such as a PTPS (e.g., a polyUb); or the putative Ag expression products are expressed with an ITII. Such methods can comprise iterative testing of putative Ags, testing of putative gD:Ag fusion protein-expressing compositions in vitro or in vivo; and any suitable CT.

### b. Epitope Types

[0619] In aspects, ≥1 epitopes of EPs can also or alternatively be characterized on the relative functionality of the epitope (e.g., antigenicity of the epitope), recognition of the epitope by the immune system, composition of the epitope, or a combination of any or all of such factors.

### 1) Immunodominant/Subdominant Epitopes

[0620] In AOTI, CEPs/EPs, e.g., gDAgFPs comprise at least one immunodominant epitope, at least one subdominant epitope, or a combination thereof. The concept of immunodominance is understood, and thus only briefly discussed herein in a non-limiting manner. Typically, an “immunodominant” epitope refers to an epitope that is most easily recognized by the immune system and thus most influence the specificity of an immune response to a composition comprising multiple epitopes in addition to the immunodominant epitopes. In general, immune responses are mounted against only a few of the antigenic peptides out of the many produced. Epitopes that are not targeted or targeted to a lower degree during an immune response are known as “subdominant epitopes.” The impact of immunodominance in epitopes is “immunodomination,” where immunodominant epitopes can curtail immune responses against non-dominant epitopes. Thus, Ags associated with a particular DCA are typically of variable immunogenicity, with the Ag stimulating the strongest response being the immunodominant Ag. The term also applies to immune cells that respond to an Ag, as such cells will typically reproduce faster and in more significant numbers, thereby dominating the immune response to antigens present in the subject or milieu. For example, T cells with a TCR that has high affinity for its antigen are most likely to be immunodominant. Similarly, if a B cell epitope binds very strongly to a B cell BCR, it will then subsequently bind with high affinity to the resultant antibodies produced by that B cell upon activation and such antibodies will out-compete any other BCR for the epitope, limiting the population of B cells.

[0621] Immunodominance is both a complex phenomenon and a relative term. Often If subdominant epitopes are introduced without the dominant epitope, the immune response will be focused to that subdominant epitope. Immunodominance typically is primarily dictated by the epitope sequence of an Ag but can vary depending on factors including simultaneous processing of multiple proteins, involvement of multiple alleles of MHC II that can bind to the same antigen, liberation of peptide (in the case of MHC I epitopes), transport of the protein to correct organelles, survival of proteolytic and other degradation processes, availability of immune cells, genetic make-up of a host (e.g., HLA-B8, DR3, DQw2a individuals are low responders to HBV Ags) and competition among several suitable epitopes on a single protein antigen. There is some evidence that flanking sequences can also influence at least T cell epitope immunodominance (Le Gall S et al. J Clin Invest. 2007; 117(11):3563-3575. doi:10.1172/JCI32047) and modification of flanking sequences to enhance or reduce immunodominance effects can be employed in the design of expression products herein. At least with respect to MHC II epitopes position of the epitope also can matter as epitopes associated with quicker MHC II binding may be more likely to survive proteolysis and thus present more effectively, making MHC II epitopes located near N or C termini of sequences, proteolytic sites, or both, often more effective (accordingly, In AOTI, a fusion protein or expression product of the invention comprises one, two, or more MHC II epitopes that are characterizable in being (a) positioned in or near (e.g., within 25 residues or less, 15 residues or less, or 5 residues or less) of the N terminus, C terminus, or both N- and C-termini of an antigenic sequence portion of an expression product or (b) associated one or more cleavage sites, such as 1+2A SCSs

[0622] Immunodominance also is not always restricted to just one Ag/epitope or cell type and does not always result in complete silencing of immune responses to subdominant epitopes. Levels of immunogenicity amongst antigens forms what is known as “dominance hierarchy” or “immunodominance hierarchy.” The position of an epitope within the immunodominance hierarchy can be relevant to the associated immune response. In AOTI, it can be useful that at least one, some, most, generally all, or all of the Ags of an expression product, such as an gDAgFP, are immunodominant. However, in aspects, it is beneficial to present only, generally only, mostly, some, or at least one immunodominant epitope. For example, in one aspect a gDAgFP is provided that comprises, PC, or only comprises epitopes that based on previous studies were considered subdominant epitopes of an Ag, wherein inclusion of the subdominant epitopes results in DOS reduced Ag immune tolerance, prolongs the immune effect associated with the subdominant Ag, increases the proportion of subjects that exhibit a clinically relevant response to the gDAgFP, or a combination thereof.

[0623] In one aspect an “immunodominant” epitope is an epitope that in a particular context was associated with a significantly larger proportion of an IR than most, generally all, or all known Ags to be expressed, administered, or present, and at least about 30% (e.g., at least about 50%, at least about 65%, at least about 75%, at least about 80%, or at least about 90%) of the overall IR (e.g., as measured by a sampling of Ag-specific adaptive immune cells). In such an aspect, a subdominant epitope will be associated with less than 30% of the relevant immune response, such as less than about 20%, less than about 15%, less than about 10%, or less than about 5% of the immune response of the expressed, administered, or known Ags in the subject/milieu.

[0624] In AOTI, CEPs comprise only one MHC I epitope, only one MHC II epitope, or only one of each such type of T cell epitope (optionally wherein the MHC I Ag is associated with one or more PTPSs or other intracellular TSs, the construct comprises an expression-enhancing intron, the nucleotide sequences of the composition encode an ITII, such as an EAT-2 polypeptide, the construct is associated with CaPNP, or a combination of some or all thereof). The invention provides a corresponding method that comprises administering such a construct initially to a host as a priming immunomodulation event, following by boosting with such Ags, such Ags plus other Ags, other Ags from the DCA or that are variants thereof, such a fusion protein, or other gDAgFP fusion proteins, or a combination of such factors, wherein such a prime/boost method results in a detectable or significant response against more Ags; less silencing of immune responses against subdominant Ags expressed in the prime step, boost step, or both steps; or a clinically significant improvement in outcomes in an individual or population. In one such aspect, the MHC I Ag is known to not result in cross-presentation. In one case, the MHC I Ag does not detectably or significantly result in cross presentation and the MHC I Ag is associated with one or more detectably or significantly enhanced CD8 responses.

[0625] In AOTI, the immune response elicited by the methods and compositions provided herein comprises an immune response to at least one subdominant epitope. In another embodiment, the immune response does not comprise an immune response to a subdominant epitope. In another embodiment, the immune response consists primarily of an immune response to at least one subdominant epitope. In another embodiment, the only measurable component of the immune response is an immune response to at least one subdominant epitope. Each type of immune response represents a separate embodiment of the present invention. In AOTI, an expression product comprises one or more overlapping epitope Ags, which are associated with a reduction in immunodominance and larger number of significant Ag-specific immune responses. In AOTI, the expression product of a composition of the invention comprises a mixture of both dominant and subdominant epitopes wherein the level of immunodominance is not significant enough to silence all, generally all, most, some, or at least one of the subdominant epitopes. Such compositions can result in a broader, more protective immune response as has been demonstrated in some studies (SFE Dominguez M R, et al. PLoS One. 2011; 6(7):e22011. doi:10.1371/journal.pone.0022011; Filskov J et al. J Virol. 2017; 91(14):e00130-17. doi:10.1128/JVI.00130-17; Ascough, S et al. Frontiers in Microbiology, 6(JAN). https://doi.org/10.3389/fmicb.2015.01506; and Ling Chen et al. Proceedings of the National Academy of Sciences March 2018, 115 (12) 3126-3131; DOI: 10.1073/pnas.1722043115). In AOTI, a method of the invention comprises the delivery of different expression product-encoding compositions to a subject, each comprising different Ags related to a type of DCA or DCA, which results in a detectably broader (or significantly broader) immune response against more Ags than if such Ags were expressed from administration of a combined expression product or repeated expression from a single type of expression product.

[0626] Examples of both dominant and subdominant epitopes are known. For example, van der Most et al. describe dominant and subdominant epitopes of chronic lymphocytic choriomeningitis virus in J. Immunol. 1996 157:5543-54. For example, NP (118-126) is a dominant epitope and GP (35-43), GP (99-108), and GP (283-291) are subdominant epitopes (amino acid numbering according to van der Most and references therein). Subdominant and dominant epitopes of HIV-1 are described by Lichterfeld et al. in Trends in Immunology 2005 26:166-71; Corbet et al. J. Gen. Virol. 2003 84:2409-21; Santra et al. J. Immunol. 2002 168:1847-53; and Goulder et al. J. Exp. Med. 1997 185:1423-33. Subdominate epitopes of Epstein-Barr virus (“EBV”) are described by Micheletti et al. Eur. J. Immunol. 1999 29:2579-89; and Duraiswamy et al. Can. Res. 2004 64:1483-89. Examples of dominant epitopes for EBV are provided by Hollsberg in Scand. J. Immunol. 2002 55:189-95. Bertoletti et al. describe dominant and subdominant epitopes of hepatitis B virus in J. Exp. Med. 1994 180:933-43. Examples of epitopes of hepatitis C virus are provided by Himoudi et al. in J. Virology 2002 76:12735-746. Immunodominance has also been recognized in association with the influenza virus, see for example Meijers et al. J. Mol. Biol. 2005 345:1099-1110. Protection against lethal viral infection by vaccination with subdominant peptides was demonstrated by Oukka et al. in J. Immunol. 1996 157:3039-45. Sendai virus epitopes are described by Cole et al. in Immunol. 1997 158:4301-09 and in J. Virology 1995 69:8057-8060. Busch and Pamer describe immunodominance in the context of Listeria monocytogenes infections in J. Immunol. 1998 160:4441-48. Taracha et al. provide examples of immunodominance in the vaccination of cattle against Theileria parva in J. Immunology 1995 155:4854-4890. Numerous examples of subdominant epitopes and methods for identification thereof are provided in U.S. Pat. No. 8,398,992. Additional relevant principles to identify, optimizing, selecting, and using immunodominant and subdominant epitopes are described in US20170065702A1; Sadegh-Nasseri S et al. Mol Immunol. 2019; 113:115-119. doi:10.1016/j.molimm.2018.08.011; Kedl R M et al. Curr Opin Immunol. 2003; 15(1):120-127. doi:10.1016/s0952-7915(02)00009-2; Sette A et al. Curr Opin Immunol. 2003; 15(4):461-470. doi:10.1016/s0952-7915(03)00083-9; Mettu R R et al. J Immunol Methods. 2016; 432:72-81. doi:10.1016/j.jim.2016.02.013; Ritmahan W et al. Immunogenetics. 2020; 72(1-2):109-118. doi:10.1007/s00251-019-01134-9; WO2015084986A1, and W2004068135A2.

### 1) Cryptic & Unnatural Immunity Epitopes

[0627] In aspects, expression products, such as gDAgFPs, can comprise one more cryptic epitopes, unnatural immunity epitopes, or both types of epitopes. Cryptic epitopes are epitopes that are usually buried within the structure of a protein (also referred to as “neo-epitopes” or “masked epitopes”), but which may trigger the immune system once they become solvent-exposed, for example due to degradation, misfolding, or aggregation. Hydrophobic portions of biomolecules (so-called “hyppos”), can be associated with damage-associated molecular pattern that leads to innate immune responses once the hyppos become solvent-exposed (see for example Seong and Matzinger, Nature Reviews 2004, 469), and various examples of previously-buried hydrophobic patches triggering immune responses have been described in the art (see for example David et al., JBC, 2001, 6370-6377; Matsuura et al., International Immunology, 2000, 1183-1192; Rasheed et al., Life Sciences 79 (2000), 2320-2328). As such, in AOTI such epitopes are included in gDAgFPs or other EPs. Many cryptic epitopes are also subdominant epitopes, and the principles relating thereto can also be applicable to the present AOTI.

[0628] In aspects, an expression product, such as a gDAgFP, comprises one or more unnatural immunity epitopes. Unnatural immunity epitopes are epitopes that are associated with an immune response that occurs rarely or with low frequency in most hosts of a species. Unnatural immunity is described in Nabel G J, Fauci A S. Nat Med. 2010; 16(12):1389-1391. doi:10.1038/nm1210-1389. Through applying proteolysis and antigen screening methods, such as those described elsewhere herein, putative unnatural immunity epitopes can be selected and confirmed unnatural immunity epitopes be identified, and in either case such antigenic/putative antigenic sequences can be incorporated into expression products.

### c. Editopes and Antigen Variants

[0629] In AOTI, EP(s) comprise one or more variants of naturally occurring antigenic sequences (“antigenic variants” or “AVs”). In AOTI, one or more of such AVs comprise an editope. An “editope” is an AV that exhibits an enhanced immune response in at least one respect and in at least one or more contexts when expressed in a subject or immunocompetent immune cell composition. Expression products can comprise any suitable number of AVs/editopes, each of which being any suitable type of AV/editope (e.g., a gDAgFP can comprise at least one MHC I AV, at least one MHC II AV, or both).

[0630] In AOTI, EP(s) comprise at least one TCE that comprises a substitution that results in a detectably or significantly modified MHC binding affinity, such as enhanced MHC binding affinity, e.g., in a subdominant, cryptic, or poorly immunogenic epitope. In AOTI, such an editope comprises one or more substitutions in epitope anchor residues. Anchor residues are residues that disproportionately contribute to MHC binding. General characteristics of anchor residues are known (SFE Hobohm U et al. Eur J Immunol. 1993; 23(6):1271-1276. doi:10.1002/eji.1830230612; Chujoh Y et al. Tissue Antigens. 1998; 52(6):501-509. doi:10.1111/j.1399-0039.1998.tb03080.x) and anchor residues have been identified and modified in association with a number of DCAs (SFE Huang J et al. BMC Immunol. 2012; 13:50. Published 2012 Sep. 10. doi:10.1186/1471-2172-13-50 (SARS-COV); Dobano C, et al. Mol Immunol. 2007; 44(9):2235-2248. doi:10.1016/j.molimm.2006.11.003 (malaria); Vierboom M P et al. J Immunother. 1998; 21(6):399-408. doi:10.1097/00002371-199811000-00001 (HVP); and Gerner W et al. J Virol. 2009; 83(9):4039-4050. doi:10.1128/JVI.01534-08 (foot and mouth disease). In AOTI, 1+ enhanced MHC binding editopes are provided in a PE sequence, which optionally includes one or more intracellular TSs, such as PTPSs, one or more cleavage sites, and one or more linkers (e.g., MSLs, FLS, or MSFLs). Enhanced MHC affinity epitopes have been demonstrated in, e.g., Tine J A et al. Vaccine. 2005; 23(8):1085-1091. doi:10.1016/j.vaccine.2003.01.001; Hofmann S, et al. Cancer Immunol Immunother. 2015; 64(11):1357-1367. doi:10.1007/s00262-015-1762-9; and U.S. Pat. No. 7,605,227. In AOTI, the enhancement is with respect to binding a particular type of MHC, such as class II DR4. In AOTI, a dominant epitope is substituted with a less immunogenic editope in EP(s), particularly in a multi-Ag method or multi-Ag expression product, such as a multi-Ag gdAgFP, resulting in a detectably broader immune response, including a detectably or significantly enhanced IR to the other Ags in EP(s). Reduced immunogenicity editopes have been demonstrated by, e.g., Ruckwardt T J et al. J Immunol. 2010; 185(8):4673-4680. doi:10.4049/jimmunol.1001606 Other principles relative to modification of editopes impacting the dominance hierarchy are described in, e.g., Sadegh-Nasseri S et al. Mol Immunol. 2019; 113:115-119. doi:10.1016/j.molimm.2018.08.011.

[0631] In AOTI, editope(s) of EP(s) are formed by generating consensus sequences from antigen homologs (intraspecies, interspecies, or both). Examples of such approaches are described in, e.g., US20190161519; Chen M W et al. Proc Natl Acad Sci USA. 2011; 108(9):3510-3515. doi:10.1073/pnas.1019744108; and Walters J N et al. Mol Ther. 2017; 25(4):976-988. doi:10.1016/j.ymthe.2017.01.022. In aspects, an editope is designed based on patterns of epitopes associated with antigenicity, such as the pattern descried in WO2012076708. In AOTI, an editope comprises one or more modifications that result in the removal of one or more Cys residues or confirmed removal of one or more disulfide bonds from the Ag, and which thereby detectably enhances antigenicity. Such a strategy is described in, e.g., US20150037371 and Shi W et al. J Virol. 1999; 73(9):7877-7881. Editopes and putative editopes for incorporation in expression products also can be generated through mutation methods, directed evolution methods, and the like described elsewhere herein (see also, e.g., Konar M et al. PLoS One. 2015; 10(6):e0128185. doi:10.1371/journal.pone.0128185). Such methods are relevant to methods of screening putative editope constructs which are provided by the invention. Other editopes comprise introduction of post translational modification sites, such as glycosylation sites, fusion with an immunomodulatory sequence (e.g., a PRR agonist/PAMP sequence, or both (these and other are approaches are reviewed in Saylor K et al. Front Immunol. 2020; 11:283. Published 2020 Feb. 24. doi:10.3389/fimmu.2020.00283) and exemplified in US20180179256. In still another aspect, an editope can comprise modifications that also or alternatively enhance Ag stability, often also leading to detectably enhanced immune responses (such an approach is exemplified by, e.g., Thomas J C et al. Hum Vaccin Immunother. 2013; 9(4):744-752. doi:10.4161/hv.22998). Other editopes are also or alternatively designed to have a reduced tolerogenic profile (SFE Berzofsky J A, et al. Cancer Immunol Immunother. 2018; 67(12):1863-1869. doi:10.1007/s00262-017-2084-x and Konar M et al. PNAS 2015; 112(48):14823-14828. doi:10.1073/pnas.1507829112). Editopes having any such characteristics described in this section can be incorporated into EPs.

[0632] Another type of editope that can be in EPs is an editope in which AAs have been substituted with a modified residue or residue outside of the naturally occurring residues. Such aspects are typically limited to polypeptide product methods and compositions, with limited exceptions, as discussed elsewhere herein. In one such aspect, the inclusion of an unusual or modified amino acid residue detectably prolongs the onset of tolerance to the editope as compared to the corresponding unmodified Ag, reduces the frequency of tolerance, reduces the severity of tolerance, or a combination of any or all thereof. An example of such an approach is exemplified in U.S. Pat. No. 8,318,172.

[0633] In AOTI, an editope in EP(s) is formed by modifying one or more immunodominant non-protective epitopes (IDNPEs, which also include epitopes that stimulate strain-specific, but less broad immunity). Changes to such an IDNPE can induce a new hierarchy of immune responses at either or both the B and T cell levels (SFE Garrity et al., J. Immunol. (1997) 159(1):279-89) against subdominant or previously silent epitopes. Such methods are often referred to as “immune refocusing” methods.

### 1) Deimmunization Variations (DIVs)

[0634] In aspects, Ag(s) or other AARS(s) of EP(s) comprise variations that DOS reduce the immunogenicity of the AARS in TR(s). Numerous strategies for deimmunization of AARS(s) are known and at a general level such variations are not limited to the methods described here. Any AARS in a CEP can comprise any suitable number and type of deimmunization variations. Suitable deimmunized variants (DIVs) exhibit suitable, comparable, or enhanced functionality. Although CEP(s) comprise Ag(s) and are desirably immunogenic, undesired immunogenicity can diminish antigenic IR(s) in TR(s) and can interfere with the transport of EPs and functioning of non-Ag EPs/AARSs in TR(s), such as RBDs, ITII(s), NANCIPI(s), CM(s) (e.g., CI(s)), etc. Accordingly, in aspects, OSMOA AARSs in EPs comprise DIV(s). In aspects, OSMOA undesirable epitopes in WT AARSs of EPs are subject to substitutions, deletions, combinations, etc., resulting in functional DIVs. Also, WT Ag(s) can include undesirable epitopes, such as decoy antigens, overlapping epitopes, undesirable levels of immunodominance, undesirable levels of Th2/Th17 responses, or undesirable BCE(s), which can undesirably reduce effectiveness or induce AE(s). In aspects, OSMOA of epitopes associated with OSMOA of such effects are eliminated or modified. In aspects, DIV(s) in EP(s) DOS reduce anti-biotherapeutic immune response(s) associated with WT AARS(s) or that arise from fusion of non-homologous AARS(s) (aBIR(s)).

[0635] In aspects, DIVs are generated through “humanization” and similar TR-based DIV strategies in which AARS(s) that potentially are not recognized as self in a TR (e.g., a human) are modified to be recognized as “self” AARS(s). Humanization of PPTs, especially Abs is well known (SFE Jones et al., Nature 321:522-525 (1986); Riechmann et al., Nature 332:323-327 (1988); and Verhoeyen, et al., Science, 239:1534-1536 (1988)) and such methods can be adapted to non-Ab AARS(s) in EP(s). More “self-like” (e.g., human-like) AARSs can be obtained by other variation methods, such as DNA shuffling (exemplified by, e.g., Chen J, et al. Int J Biol Macromol. 2016 January; 82( ):522-9).

[0636] In aspects, TCE DIV(s) comprise substitutions or deletions that eliminate undesired TCE(s) or that DOS reduce undesired immunogenicity of DIVs. In aspects, TCE DIS(s) exhibit DOS reduced binding to MHC(s). TCE DIV(s) and other DIV(s) can be generated by experimental methods (e.g., ELI screening), computational methods, and combinations. In general, critical MHC binding residues are deleted or substituted to generate such TCE DIV(s) (which typically are no longer TCE(s)). In aspects, hydrophobic AAs, aromatic AAs, in an epitope or predicted epitope are removed and the putative DIV tested for reduced immunogenicity. Such methods can include computational or experimentational assessments of changes in structure, function, or both (e.g., receptor-binding ability). In aspects, structure of a DIV-associated PPT is similar (e.g., as evaluated by structure similarity methods provided herein); function(s) of AARS(s) in the PPT are suitable, comparable, or enhanced; or both, and the immunogenicity of the DIV PPT is DOS reduced. Such approaches have been successfully applied to functional PPTs, such as staphylokinase (Warmerdam P A, et al. Thromb Haemost. 2002 April; 87(4):666-73); erythropoietin (Tangri et al., J Immunol. 2005 Mar. 15; 174(6):3187-96); and Factor VIII (initial variant with 75% activity and partial deimmunization described in Pratt K P, Cell Immunol. 2016 March; 301( ):12-7 and variant with comparable functioning and further improved deimmunization (and related strategy) described in Jankowski W et al. Blood Adv. 2019; 3(17):2668-2678. doi:10.1182/bloodadvances.2019000338). Tools for identifying potential immunological active regions of PPTs and recommending modifications are available in the art (e.g., the IEDB deimmunization tool, available at http://tools.iedb.org/deimmunization/). Applying such analysis to, e.g., BHV-1 gD, identifies an immunogenic sequence at AAs 155-169 of iBHV-1 gD (SEQ ID NO:646) and possible variations thereof, e.g., FVs at AA M-173, e.g., DDELGLPMAAPARLV (SEQ ID NO:647), DDELGLGMAAPARLV (SEQ ID NO:648), and DDELGLDMAAPARLV (SEQ ID NO:649) that are predicted to be less immunogenic. Applying the same method to murine EAT-2 (mEAT-2), identifies the sequence at AAs 91-105 (QGLVVHLSNPIMRNN (SEQ ID NO:650)) as immunogenic and recommends variations at the 2^{nd} Val, 2^{nd} Leu, or Met of the AARS (e.g., QGLVDHLSNPIMRNN (SEQ ID NO:651), QGLVVHLSNPDMRNN (SEQ ID NO:652), or QGLVVHDSNPIMRNN (SEQ ID NO:653) to reduce IR(s).

[0637] Another type of DIV is a de-immunodominance DIV (DEDIV). DEDIV(s) comprise modifications that reduce the immunodominant effects of a BCE or TCE. Immunodominance and such variations are further discussed below. Briefly, DEDIVs reduce immunodominance that can block other subdominant epitopes (e.g., cryptic TCEs). The ability of such DIV(s) to increase Ag-specific IR(s) in PE and multi-Ag compositions has been demonstrated in respiratory syncytial virus epitopes (Ruckwardt T J, et al. J Immunol. 2010; 185(8):4673-4680. doi:10.4049/jimmunol.1001606) and T. cruzi (Dominguez M R, et al. PLoS One. 2011; 6(7):e22011. doi:10.1371/journal.pone.0022011). Such DIV(s) can be used in CEP(s) and such methods can be adapted to use with other Ag(s) described here.

[0638] In aspects, immunodominance is enhanced or reduced in EP(s) through the use or non-use of ITS(s). E.g., an Ag can be directed to an exosome over an immunoproteasome to reduce immunodominance in some aspects, or an Ag can be directed to an immunoproteasome to enhance immunodominance. As exemplified by this statement in some aspects, immunodominance of Ag(s) are enhanced in AgV(s). In some aspects, CEP(s) comprise only one immunodominant Ag, such as an immunodominance-enhanced AgV. Such methods are exemplified in, e.g., Dzutsev A H et al. Int Immunol. 2007; 19(4):497-507. doi:10.1093/intimm/dxm016. In aspects, enhanced MHC affinity of TCEs results in lower immunogenicity of PPTs (Id).

[0639] Immunodominance also can be modulated through controlling Ag expression levels. In aspects, immunodominant epitopes, such as immunodominant TCE(S) are modified, excluded, expressed in lower amounts, etc., to ensure SMOA Ag(s) in CEPs induce IR(s).

[0640] In aspects, SMOA of the Ag(s) in multi-Ag CEPs (e.g., in PE CEPs) are screened, selected, or determined to not result in an undue immunodominance effect that blocks SMOA of the other Ag(s) in the CEP inducing DOS IR(s) (such a PE is exemplified in, e.g., Cho H I, et al. Cancer Immunol Immunother. 2012; 61(3):343-351. doi:10.1007/s00262-011-1110-7). In aspects TCEs/BCEs exhibit DOS immunodominance hierarchy in a TR.

[0641] In aspects, immunodominance or immunogenicity is blocked in a DIV, i.a., by introduction of modifications (e.g., cys-cys bridges) that block access to an epitope (exemplified in Rouvinski A et al. Nat Commun. 2017; 8:15411. Published 2017 May 23. doi:10.1038/ncomms15411). In aspects, epitope immunodominance or immunogenicity is modified by elimination of a domain (e.g., the HA head of influenza), unmasking subdominant epitopes (e.g., through removal of glycosylation sites, cys-cys bridges, and the like), or enhancing immunogenicity of a subdominant epitope (e.g., through hyperglycosylating a BCE, enhancing MHC binding in a TCE, or combining part of an epitope with other AARS(s), such as in a chimeric epitope. Such approaches are reviewed in, e.g., Mathew N R, Front Immunol. 2020; 10:2997. doi:10.3389/fimmu.2019.02997.

[0642] In aspects, an immunodominant epitope is substituted with a mimetic with reduced immunodominance effects. This approach is exemplified in de Taeye S W et al. J Biol Chem. 2018; 293(5):1688-1701. doi:10.1074/jbc.RA117.000709. In aspects, increasing the diversity of epitopes in a CEP reduces immunodominance (SFE Woodruff M C et al. Cell Rep. 2018; 25(2):321-327.e3. doi:10.1016/j.celrep.2018.09.029).

[0643] Other examples/approaches for reduced immunodominance that can be adapted to EPs are described in Kim A et al. Curr Opin Immunol. 2015; 34:9-15. doi:10.1016/j.coi.2014.12.005 and Liu et al. J Immunol. 1993; 151(4):1852-1858. Similar and other methods, principles, and compositions are DEH WRT immunodominant and subdominant epitopes, generally. Such methods can be combined with, substituted by, or substitute any methods described in this section and vice versa.

[0644] In AOTI, DIV(s) at a PPT level comprise adding TREGE(s) to EPs, which reduce EP IR(s). In aspects, no TREGEs are present. In AOTI, TREGE(s) in EP(s) are removed or the effect of TREGEs (e.g., MHC binding) is reduced.

[0645] In method aspects, TR(s) can be subjected to methods that induce partial tolerance to PPTs to reduce immunogenicity or to reduce the immunodominant effects of potentially immunodominant epitopes. Such approaches are exemplified by, e.g., Silva M, et al. Cell Rep. 2017; 21(13):3672-3680. doi:10.1016/j.celrep.2017.12.014.

[0646] In aspects, CEPs comprise IL-10 PPTs (isolated or FPs). In AOTI, IL-10 PPTs in CEPs DOS reduce immunodominance effects of OSMOA potentially immunodominant epitope(s) in CEPs (such IL-10 effects are covered in St Leger A J, J Immunol. 2013; 191(5):2258-2265. doi:10.4049/jimmunol.1300585).

[0647] In aspects, flanking sequences of epitopes are modified to modulate immunodominance. Such an approach is discussed in, e.g., Mo A X, et al. J Immunol. 2000; 164(8):4003-4010. doi:10.4049/jimmunol.164.8.4003.

[0648] In aspects, full PPT Ag(s) or Ag(s) significantly larger than epitope(s) are incorporated in CEPs, but comprise fragments of full-length PPT Ag(s), resulting in immunodominance reduction. SFE Liu Y et al. Vaccine. 2011; 29(14):2582-2589. doi:10.1016/j.vaccine.2011.01.049

[0649] Services for the design of DIVs are commercially available, such as EpiVax DeFT™ service (https://epivax.com/deimmunization), the RDIT® De-immunization Services available from Creative Biolabs (https://www.creative-biolabs.com/De-immunogenicity-De-immunization.html), and the Protein deimmunization platform services available from Abzena (https://abzena.com/development-services/protein-engineering/protein-deimmunization/). DIV software-based design tools are provided/described at https://omictools.com/deimmunization-tool and http://2018.igem.org/Team:Tuebingen/Software.

[0650] Peptide vaccines, such as those that can be expressed from CEPESCs described herein, can be subjected to derivatization (e.g., PEGylation, PASylation, reductive methylation, or combinations) to block EP epitope(s).

[0651] Additional examples, approaches and compositions related to DIVs that can be adapted to such aspects or employed in such aspects are described in, e.g., Griswold K E, et al. Curr Opin Struct Biol. 2016; 39:79-88. doi:10.1016/j.sbi.2016.06.003; Parker A S et al. J Bioinform Comput Biol. 2011; 9(2):207-229. doi:10.1142/s0219720011005471; De Groot A S, et al. Dev Biol (Basel). 2005; 122:171-194; Parker A S et al. BMC Bioinformatics. 2010; 11:180. Published 2010 Apr. 9. doi:10.1186/1471-2105-11-180; Choi Y et al. Methods Mol Biol. 2017; 1529:375-398. doi:10.1007/978-1-4939-6637-0_20; WO2017059270; EP3143137; U.S. Pat. No. 7,465,572; Roy A et al. Methods. 2017; 131:33-65. doi:10.1016/j.ymeth.2017.09.008; and Ferdosi S R et al. Nat Commun. 2019; 10(1):1842. doi:10.1038/s41467-019-09693-x.

[0652] Undesirable BCEs can be removed by similar methods. Conformational BCEs can be removed by substitution of residues or non-inclusion of some parts of the conformational BCE. Examples of this approach are Schmohl J U et al. Toxins (Basel). 2015 Oct. 10; 7(10):4067-82 and Cantor J R et al. Methods Enzymol. 2012; 502( ):291-319. In other aspects, the number of BCEs are reduced by GSVRs, which are described in detail below.

### 2) Glycosylation Site Removal Variants (GSRVs and GSRAgVs)

[0653] In AOTI, an expression product comprises one or more AVs that comprise the removal of one or more possible or known glycosylation sites or glycosylation sites of a particular type. In one such aspect, an expression product, such as a gDAgFP can be characterized by one, some, most, generally all, or all of the N-linked glycosylation-associated sequences of the antigen being substituted to remove the potential/known N-linked glycosylation sites. For example, any or all of the N-X-S sequences, N-X-T sequences, or both, in such an antigen sequence can be modified by a substitution of the N residue. In AOTI, the N residues of any substituted sites are substituted with a D residue, an E residue, or either a D or E residue. In aspects, a linker alternatively or also is placed in one or more of such sequences as a substitute for the N residue. Such a linker can be a short linker, such as di-peptide (e.g., AA) or tripeptide linker or a mid-sized or longer linker (e.g., a GGGS, GSGS, or GGGG linker). In still another aspect, one or more of such sites are deleted. In aspects, amino acid sequences of the expression products outside of the Ag sequences also or alternatively are subjected to similar modifications such that at least one, at least some, most, generally all, or all of the sequences having such a pattern in such other amino acid sequences are also or alternatively substituted or removed. In AOTI, such modifications result in a detectably or significantly reduced humoral response to the expression product(s) comprising such modifications. In AOTI, such a reduced humoral response leads to a detectably or significantly longer/sustained immune response, clinically improved IR in a population, or combination.

### 3) Removal Variants/Decoy Epitope Removal Variants

[0654] In AOTI, an editope or AgV comprises a deletion of residue(s) from a WT epitope or Ag sequence. In AOTI, an editope comprises a sequence in which one or more decoy antigens are removed by substitution, deletion, or a combination thereof. Decoy epitopes are immunodominant epitopes with no known function. B cell decoy epitopes result in ineffective humoral immunity by inducing high level production of non-protective antibodies and silencing or diminishment of neutralizing Abs. In AOTI, an EP will comprise antibody sequences to the decoy epitope. In aspects, an EP will comprise a variant in which the decoy epitope is also or alternatively removed from the relevant sequence through substitution, deletion, or a combination thereof. Thus, in one AOTI the methods OTI are employed to treat a DCA that is associated with a decoy epitope effect. In AOTI, such a method is performed in swine.

[0655] Porcine circovirus (PCV) is an example of a virus that expresses a decoy antibody epitope on the surface of the viral particle. Relevant to other aspects of the invention, vaccines associated with decoy antigens also are typically ‘leaky’ because they are not effective in preventing infection ore reinfection, resulting in a buildup of viral reservoirs in immunized animals and higher rates of viral transmission and infection in a population. SFE Jin J et al. Biochem Biophys Res Commun. 2018; 496(3):846-851. doi:10.1016/j.bbrc.2018.01.141; Yu C et al. Vaccine. 2016; 34(50):6358-6366. doi:10.1016/j.vaccine.2016.10.044; and Trible B R et al. Virus Res. 2012; 164(1-2):68-77. doi:10.1016/j.virusres.2011.11.018. Aspects of this invention specifically relate to the treatment or protection of swine against PCV and in one facet of such aspects the method comprises administering a sequence corresponding to a sequence normally comprising a PCV decoy Ag in which the decoy Ag has been removed. In AOTI, the decoy Ag is replaced in the sequence with a different PCV Ag, which may be associated with one or more linkers and connected to other upstream, downstream, or surrounding PCV Ag residues. Another virus comprising at least one decoy epitope is Porcine reproductive and respiratory syndrome virus (PRRSV) (SFE U.S. Pat. No. 9,441,015; Thaa et al. PLoS One. 2013; 8(6):e65548. Published 2013 Jun. 6. doi:10.1371/journal.pone.0065548; and Mateu E et al. Vet J. 2008; 177(3):345-351. doi:10.1016/j.tvjl.2007.05.022). The treatment or protection of swine against PRRSV represents another specific aspect of the invention. In AOTI, an EP comprises a PRRSV GP5 Ag sequence that comprises residues normally associated with the GP5 decoy epitope, but wherein the decoy epitope has been removed/replaced. Another example of a virus associated with a decoy epitope effect treatable by similar editope-comprising EPs is foot-and-mouth disease virus (SFE Szczepanek S M et al Clinical and Vaccine Immunology: CVI. 2012 April; 19:461-467. DOI:10.1128/cvi.00035-12).

### d. Clinically Relevant Antigens (CRAs) and Putative CRAs (PCRAs)

[0656] In AOTI, EPs do not comprise any putative Ags, such as where the composition or method is employed for clinical application at a broad scale. In one such aspect, one, some, most, generally all, or all of the Ags of the EP are either known antigens, clinically relevant antigens (CRAs), or both. In AOTI, one, some, most, generally all, or all of the Ags of the EP or a portion of the EP such as the gDAgFP are CRAs.

[0657] A “clinically relevant antigen” (or “CRA”) is an antigen that is known to be displayed on the surface of disease-associated cells, including or limited to immune system cells, in connection with a DCA in a species, patient type, population, or individual. In AOTI, a CRA is a CRA that has been identified in subjects of a particular species when experiencing a DCA. In AOTI, a CRA is an antigen that has been detected in a sample of a population impacted by the DCA. CRAs can be identified by taking one or more biological samples from such subjects, such as PBMC, and subjecting the samples to one or more methods that confirms, possibly isolates, possibly identifies, or possibly characterizes the DCA-associated antigens on cell surfaces. In AOTI, the method comprises expression library immunization, which is discussed elsewhere here. In one such aspect, the expression library immunization is performed with a gDAgFP-encoding construct comprising a putative CRA. In aspects, the method also or alternatively comprises peptide library screening, e.g., using flow cytometry. In still a further aspect, a method also or alternatively comprises performing one or more immunoproteomic methods, such as mass spectrometry methods (applied to Ags or Ag portions, such as proteolytically digested Ag fragments, removed from MHC:Ag complexes), to identify or characterize epitopes. The invention according provides expression products, such as gDAgFPs, comprising one or more CRAs. The invention also provides a method of preparing immunogenic compositions comprising the steps of (a) obtaining one or more samples from a subject exposed to a DCA, (b) identifying one or more putative CRAs from the one or more samples by applying one or more epitope identification methods, (c) developing one or more nucleotide sequences encoding one or more gDAgFPs comprising the CRAs, (d) assessing the immune response associated with the gDAgFPs, and (e) selecting one or more immunogenic compositions based on the results.

### ix. Peptidic Checkpoint Modulators (PCMs) & Other CMs

[0658] In aspects, CEPs comprise peptidic checkpoint modulators (PCMs). CCCs and AACs can comprise PCMs, PCM-encoding NSs, & other checkpoint modulators (CMs). PCMs can modulate any such CPCR or any such class of CPCRs. CCCs and AACs can be/comprise any PCM or corresponding PCMESNS that is described in this disclosure (and PCMs can comprise any PCM that corresponds to an IM CCC/AAC described herein).

[0659] A CM is any molecule that DOS modulates an immune checkpoint. Immune checkpoints typically are IM pathways (biological processes involving ≥2 interacting biomolecules usually of different types, but sometimes of the same type). Checkpoints ensure proper functioning of the immune system and prevent excessive host self-damage when IRs are triggered (e.g., by controlling the duration and extent of IRs).

[0660] Immune checkpoints are often overexpressed in tumor cells & cells within a TME and “hijacked” by several pathogens, compromising the ability of a host's immune system to mount an effective anti-DCA IR. E.g., PD-1, a CI, is a regulator of apoptosis and is critical for maintaining T cell expansion in IRs. Binding of PD-1 by its cognate ligand (PD-L1), attenuates the anti-tumor IR and promotes tumorigenesis. A PD-1/PD-L1 CI is a CI that blocks this interaction (checkpoint). A PD-L1 CI binds/blocks PD-L1 and a PD-1 CI binds/blocks PD-1. A PD-L1/PD-1 CI blocks either member of this checkpoint pathway.

[0661] Checkpoints can be either stimulatory, inhibitory, or situationally either stimulatory or inhibitory. Many IRs in TRs are regulated by a balance between several of such co-stimulatory and inhibitory signaling pathways.

[0662] Stimulatory checkpoints are often described as “co-stimulatory,” as initial stimulation of the immune system is antigenic stimulation with the need for co-stimulation providing a “check” on the IR or the magnitude of an IR. Stimulatory pathways often are commandeered by DCAs, such as tumor cells promoting tumorigenesis. Co-stimulatory pathways proteins, such as OX40, GITR, ICOS, 4-1BB (CD137), have roles in proliferation and activation of cytokines production. Increasing the number of effector cells that express co-stimulatory molecules through cell therapy approaches can improve CEs. Inhibitory checkpoints reduce/block IRs even in the presence of Ag stimulation.

[0663] Typically, EP PCMs and many IM CCCs & AACs can be characterized as “immunoactivators” (or immunostimulators). An immunostimulator is an IM that promotes or amplifies IR(s). Activating IRs can, i.a., comprise proliferation of IC(s) (e.g., TCs), enhanced IC distribution/motility, or enhanced cytokine secretion. Immunoactivating EP PCMs include immunoactivating Abs, Ab FPs, & non-Ab PPTs (e.g., ICRs/ICRLs).

[0664] In aspects, immunoactivating PCMs or CCC/AAC IMs comprise checkpoint inhibitors (CIs), which act through suppressing inhibitory checkpoint pathways. Well-studied inhibitory immune checkpoint PPTs include PD1 and CTLA-4. Numerous additional CIs have also now been studied including lymphocyte activation gene-3 (LAG-3), B and T lymphocyte attenuator (BTLA), programmed death-1 homolog (PD-1H), T-cell immunoglobulin and immunoreceptor tyrosine-based inhibitory motif domain (TIM-3)/carcinoembryonic antigen cell adhesion molecule 1 (CEACAM1), VISTA, and the poliovirus receptor (PVR)-like receptors. SFE Torphy R J et al. Int J Mol Sci. 2017; 18(12):2642. Published 2017 Dec. 6. doi:10.3390/ijms18122642 and Zahavi D J et al. Int J Mol Sci. 2019; 20(1):158. Published 2019 Jan. 4. doi:10.3390/ijms20010158, discussing CIs that can be adapted/incorporated into CEPs, or used as CCCs or AACs.

[0665] CEPs can comprise any suitable number of PCMs of any suitable type. In aspects, CEPs comprise a single PCM. In aspects, CEPs comprise two PCMs. In aspects, CEPs comprise ≥2, ≥3, ≥4, or ≥5 PCMs. In aspects, OSMGAOA of any 2+ PCMs in a CEP are heterologous/not related. In aspects, OSMGAOA of any 2+ PCMS in a CEP are homologous/related (e.g., a CEP can comprise two gDPs that each act as CIs). In aspects, 2+ PCMs are expressed as separate PPTs. In aspects, a FP comprises 2+ PCM AARSs. In aspects, OSMGAOA PCM EPs are NFPs. In aspects, OSMGAOA PCM EPs of a CEP are FPs. In aspects, CEPs comprise a mix of PCM FPs and NFPs.

[0666] PCM(s) typically can be characterized as CPCRs, CPRLs, or as CPCR/CPRLs (many checkpoint pathways involve cell surface protein-to-cell surface protein interactions and some are self-ligand ICRs). In aspects, OSMGAOA PCM(s) are CPCRs or CPRLs; ICRs or ICRLs; or both. Some types of PCMs comprise forms that can be classified as CPCRs/CPRLs and other forms that are only CPRLs (e.g., VCAM-1 can either be a cell membrane bound PPT or a soluble ligand for its related receptor). This can be true of FFs and FVs, e.g., where only a soluble portion of a WT CPCR is used as a PCM. Typically, PCM(s) can also be characterized as being TS(s). E.g., PCM(s) that are ICRL(s) are also ICTS(s) with ICR RBDs. In aspects, OSMGAOA CEP PCM(s) or CCC/AAC IMs further can be classified as agonists, antagonists, partial agonists, partial antagonists or combinations thereof.

[0667] In aspects, any PCM referenced herein that has a heterologous ligand is co-expressed with its ligand in a CEP. In aspects, any PCM referenced herein that has a heterologous ligand is substituted with its ligand.

[0668] PCMs can have any suitable origin and composition. In aspects, OSMGAOA PCM(s) in a CEP comprise Abs or Ab FP. In aspects PCMs, such as PCM Ab PPTs can be multimeric, multivalent, multi-specific, or a combination of some or all thereof. Examples of immunostimulatory Ab(s) include anti-CD40L Abs, anti-OX40 Abs, anti-CD2 Abs, anti-CD28 Abs, anti-CD137 Abs, anti-CTLA4 Abs, anti-PD-1 Abs, anti-PD-L1/PD-L2 Ab, or anti-ICOS Abs. Ab FP PCM(s) can comprise AARS(s) from such Ab(s).

[0669] In aspects, OSMGAOA PCMs in a CEP are non-Ab PPTs. In aspects, OSMGAOA PCMs in CEPs are non-Ab EPs that are multimeric, multivalent, multi-specific, or exhibit a combination thereof. In aspects, PCM(s) are monospecific, but multivalent (e.g., PCMs can be trap protein(s), such as a trap protein specific for a checkpoint ICR).

[0670] In aspects, a PCM is a CSM ICR or CSM ICRL (e.g., B7, ICAM-1, LFA-3/CD58, 4-1BBL, CD59, CD40, CD70, VCAM-1, or OX-40L, or a ligand thereof). In aspects, a PIM also or alternatively can comprise a PPT or AARS of a T cell costimulatory molecule, such as CD28, CD40, or ICOS or a ligand or other immunomodulator thereof. In aspects, a PIM binds a co-stimulatory CD80 receptor, a CD86 receptor, or a CD46 receptor.

[0671] In aspects, a PCM is an inhibitor of IDO1, ID02, TD02, or A2aR. In aspects, the PIM is or is a ligand or adaptor for PD-L2 (B7-DC, CD273), TIM4, 2B4, B7-H2, B7-H3, B7-H4, B7-H6, CD2, CD27, CD28, CD30, CD30L, CD40, CD40L, CD48, CD58, CD70, CD80, CD86, CD96, CD112, CD113, CD137, CD137L, CD155, CD160, CD226, CD276, CRTAM, DR3, GAL9, GITR, GITRL, HAVCR2, HVEM, IDOI, ID02, ICOSL, ILT3, ILT4, LAIR1, LIGHT, LTBR, MARCO (macrophage receptor with collagenous structure), PS (phosphatidylserine), OX40L, SLAM, TD02, TL1A, VISTA, VTCN1, or any combinations thereof.

[0672] In aspects, OSMOA PCMs are immunoreceptor tyrosine-based inhibition motif (ITIM) receptor modulator(s). In aspects, a PCM blocks binding/activity of an ITIM receptor. Examples of ITIM receptors include NKG2A/CD94, PD-1, LIRs, SIRPa, TIGIT, and KIRs. In aspects, OSMOA PICCMs are non-ITIM CM receptor modulators. Examples of non-ITIM CM receptors include CTLA-4, LAG-3, TIM-3, and CD200R. In aspects, CEPs comprise both ITIM ICR and non-ITM ICR modulator(s). ITIM receptors typically are inhibitory, but in some cases are stimulatory.

[0673] In aspects, OSMOA PCMs are immunoreceptor tyrosine-based activation motif (ITAM) receptor modulators. In aspects, a PCM binds and activates an ITAM receptor. Examples of ITAM receptors include CD16, NKp30, NKp46, NKG2D, and DNAM-1. Typically, ITAM receptors are stimulatory. In some cases, ITAM receptors are inhibitory.

[0674] PCMs induce IRs in ≥1 types of cells. In aspects, OSMGAOA of cells are ICs. In aspects, PCMs primarily, generally only, or exclusively exhibit effects in ICs. In aspects, PCMs exhibit DOS effects in ICs and non-IC cells.

[0675] In aspects, OSMGAOA PCMs in CEPs exhibit significant IRs primarily, generally only, substantially only, or only in NKCs. Examples of PCMs that exhibit significant IRs in NKCs include modulators of activating NKC CPCRs e.g., CD94-NKG2C/E/H heterodimeric receptors; NKG2D; activating KIRs; natural cytotoxicity receptors such as NKp30, NKp44, and NKp46; & the nectin/nectin-like binding receptors DNAM-1/CD226 and CRTAM and NKC receptors (NKCRs) that inhibit NKC activation including inhibitory KIRs; CD94-NKG2A; & the nectin/nectin-like binding receptors TIGIT and CD96. Other NKCRs that regulate NKC activation include SLAM family receptors including 2B4/CD244, CRACC/SLAMF7, and NTB-A/SLAMF6, as well as Fc gamma RIIIA/CD16a, CD27, CD100/Semaphorin 4D, and CD160. The sialic acid-binding Siglecs (Siglec-3,-7, & -9), ILT2/LILRBi, KLRG1, LAIR-1, CD161/NKR-P1A, and CEACAM-1 are also NK cell inhibitory receptors. PVR is another NKC-associated CPCR (Xu F et al. Cancer Immunol Immunother. 2017; 66(10):1367-1375. doi:10.1007/s00262-017-2031-x). Inhibitory T-cell receptors also present in NKCs include CTLA-4, PD-1, T cell immunoglobulin- and mucin-domain-containing molecule 3 (TIM-3), lymphocyte activation gene 3 (LAG-3), & TC immunoreceptor with Ig and ITIM domains (TIGIT). Beldi-Ferchiou A et al. Int J Mol Sci. 2017; 18(10):2129. doi:10.3390/ijms18102129 and Sun H, Front Immunol. 2019; 10:2354. doi:10.3389/fimmu.2019.02354 provide more.

[0676] In aspects, OSMGAOA IR(s) of PCM(s) PCGCOSCO or CO modulates both CTLs and NKCs. Examples of such ICRs include PD-1, LAG-3, TIGIT, and TIM-3 receptors. PCMs that modulate CPCR(s) common to NKCs and T-cells include TIGIT, NKG2A, & inhibitor KIRs or NKCs. In aspects, PCMs DOS modulate activity in T-cells and NKT cells. Examples of such PCMs include modulators of PD-1, LAG-3, and TIM-3.

[0677] In aspects, OSMGAOA IR(s) of PCMs(s) are in ≥2, ≥3, ≥4, or all of DCs, NKCs, INKT cell, γδ T cells, or B-1 B cells.

[0678] In aspects a PCM binds to a receptor expressed in epithelial cells, fibroblast cells, or both types of cells and induces IRs therein. Although not classified as ICs, such cells can be involved in IRs. E.g., epithelial cells can contribute to IRs and given their abundance can play a significant role in CEs. An example of such PCMs include HVEM-binding gDPs. Another checkpoint pathway involving many non-IC cells is the fibroblast activation protein-alpha (FAP) checkpoint pathway. SFE Chen L et al. Biochem Biophys Res Commun. 2017; 487(1):8-14. doi:10.1016/j.bbrc.2017.03.039. In aspects, PCMs comprise FAP PPTs or modulators of a FAP pathway. The use of FAP checkpoint modulators with gDAgFPs is exemplified in some of the Wistar Art and such approaches can be adapted to use in any of the the improved/novel CEPESCs described herein. In aspects, PCMs do not comprise FAP PPTs or FAP modulators. In aspects, PCMs primarily, generally only, substantially only, or only exhibit significant IR(s) in ICs.

[0679] Examples of modulators that exhibit primarily ITIC IRs, particularly primarily NKC and DC IRs, include SLAM receptor modulators (e.g., SLAM CPRLs such as CRACC modulators, e.g., CRACC inhibitors, and SLAM STAPs, such as EAT-2 PPTs), modulators of KIRs, modulators of NKG2Ds, and modulators of STING PPTs.

[0680] In aspects, OSMGAOA of the PCMs in CEPs exhibit IRs, are expressed endogenously, or both, primarily, generally only, substantially only, or only in (1) DCs, (2) in DCs and T-cells, (3) in DCs and NKCs, or (4) in DCs, NKCs, and T-cells. Examples of such PCMs include modulators of PD-1/PD-L1 PPTs, ILT2 modulators, and TIM-3 modulators. In aspects, OSMGAOA PCMs are PPTs corresponding to DC PPTs expressed only (or significantly more expressed) upon DC stimulation (e.g., DC-TLR stimulation), such as PD-L1 PPTs or ILT2 PPTs, or modulators thereof.

[0681] In aspects, a PCM is a PPT that has an expression induced by APC (e.g., DC) activation/maturation or is an FF or FV thereof. In aspects, a PCM is a CPCR or CPRL primarily expressed on APCs, such as DCs, e.g., GITRL.

[0682] In aspects, a PCM is a soluble isoform of a WT PPT having other isoforms that are expressed as CPCRs. An example of such a PCM is a soluble canine CD80 isoform, a soluble human CD80 isoform, or a canine CD86 soluble isoform (or FFs or FVs thereof).

[0683] In aspects, CEPs include 2 PCMs that are heterologous. In aspects, PCMs include 2 PCMs that modulate pathways of different CPCR families (discussed below). Examples of such aspects include combination of PD-1 pathway blocking PCMs with CD20-blocking PCMs, inhibitory KIR-blocking PCMs, TIGIT blocking PCMs, and the like. Additional examples of such combinations are mentioned below.

[0684] In aspects, PCMs DOS result in reduced T-cell anergy, reduced IC tolerance, enhanced IRs (including proliferation of ICs, activity of ICs, or both), enhanced CEs, and combinations of any thereof.

[0685] In aspects, a PCM exhibits DOS IRs in DCs. In aspects, OSMGAOA PCMs of a CEP primarily, generally, substantially only, or only exhibit significant IRs in DCs. In aspects, OSMGAOA PCMs primarily, generally, substantially only, or only exhibit significant IRs in DCs and other ITICs (in aspects only DCs and NKCs). In aspects, PCM(s) of CEPs exhibit DOS IRs in 2 of DCs, T-cells, and NKCs (e.g., all 3 cell types). In aspects, PCM(s) of CEPs exhibit DOS greater IRs in DCs than in other cells. In aspects, PCM(s) exhibit DOS more IRs in ITICs than other cells or only exhibit DOS IRs in ITICs (such PCMs can be referred to as “ITIIMs” herein). In aspects, PCM(s) exhibit DOS IRs in ICs, comprising DCs than other cells. Examples of PCMs that exhibit significant IRs in DCs include modulators of DEC-205, Langerin, Clec9A, DC-SIGN216, and MR217, and other DC ICRs described herein. In aspects, modulators of any such ICR(s) can be PCMs.

[0686] PCMs and other CIs have been extensively studied. Examples of PCMs and other CIs and related principles and methods applicable to these aspects are described in, e.g., De Sousa Linhares A et al. 2018; 9:1909. doi:10.3389/fimmu.2018.01909; Khan M et al. Front Immunol. 2020; 11:167. doi:10.3389/fimmu.2020.00167; and Sun H et al. Front Immunol. 2019; 10:2354. doi:10.3389/fimmu.2019.02354.

### a. ITMs and ITICITMs

[0687] In aspects, OSMGAOA EPs in a CEP are internal target immunomodulators (ITMs/ITIMs) (e.g., PCMs and other EPs that modulate a checkpoint pathway through modulating an internal portion of a PPT or a PPT or other target present in the interior of a cell). CEPs can comprise any suitable number and any suitable type of ITIs. Most ITMs modulate a checkpoint pathway, e.g., by directly interacting with a CPCR or another factor downstream of a checkpoint pathway signaling cascade or upstream of a checkpoint cascade (e.g., a transcription factor). As such, ITMs are discussed here. However, ITIs can include PPTs that are not associated directly or otherwise with checkpoint modulation. CEPs can include any suitable number of any suitable type of ITIs. A number of ITMs are known in the art and can be incorporated in CEPs. Accordingly, such PPTs are described briefly here.

[0688] In AOTI, ITIs in CEPs include modulators of phosphoinositide-3 kinase (PI3K)/Akt/mTor (“PAM”) pathway/cascade system, which although not classified as a CM in the art, is related to CM functions/pathways and includes CM elements, such as PTEN, and accordingly is included here, although this exemplifies that ITIMs include both PCM and non-PCM PPTs (despite being described under the heading of “Checkpoint Modulators”). In aspects, ITIMs include PAM pathway inhibitors. Examples of such PAM pathway inhibitors include YVPGP (SEQ ID NO:731), P6-55 (Guo W et al. Cancer Lett. 2017; 405:1-9. doi:10.1016/j.canlet.2017.07.015), and the peptides described in WO2016103176. In aspects, such an inhibitor is a PTEN PPT (SFE Dillon L M, Miller T W. Therapeutic targeting of cancers with loss of PTEN function. Curr Drug Targets. 2014; 15(1):65-79. doi:10.2174/1389450114666140106100909). Additional examples of ITIs are agents that block IκBα, NF-κB PPTs, HLA-B-associated transcript 3 (BAT3) PPTs, NOX2 inhibitors, and nuclear proteins such as mixed-lineage leukemia protein-5 (MLL5) PPTs (e.g., splice variants thereof that induce IR(s)) or PPTs that block proliferating cell nuclear antigen (PCNA), such as anti-PCNA intrabodies.

[0689] In aspects, CEPs comprise ITI(s) that modulate a transcription factor involved in IRs/CEs against CDAs, a protein that modulates a transcription factor, an internal portion or internally present oncoprotein, or a combination thereof. Examples of such it is include modulators of the human murine double minute 2 (MDM2) oncoprotein/p53 pathway or a MDMX/p53 pathway (exemplified by, e.g., Midgley C A et al. Oncogene. 2000; 19(19):2312-2323. doi:10.1038/sj.onc.1203593 and Phan J et al. J Biol Chem. 2010; 285(3):2174-2183. doi:10.1074/jbc.M109.073056). Additional transcription factors (“TFs”) involved in IRs include E2A, Pax5, EBF, PU.1, Ikaros, GATA3, Th-POK, Tbet, Bcl6, NF-κB, STATs, and IRFs. EPs can include modulators of such TFs that induce IRs. E74-like ETS transcription factors (e.g., ELF-1 and ELF-4) (SFE Seifert et al. PLoS Pathog. 2019; 15(11):e1007634. doi:10.1371/journal.ppat.1007634). EPs can, e.g., comprise ELF PPTs, FFs, or FVs. In aspects, EPs include one or more ITI PPTs of the interferon-regulatory factor (IRF) proteins (IRF) family of TFs or FFs or FVs thereof (described in, e.g., Yanai H et al. Oncoimmunology. 2012; 1(8):1376-1386. doi:10.4161/onci.22475). Additional TFs involved in IRs include PPTs of the nuclear factor of activated T-cells (NFAT) family, Activator Protein-1 (AP-1) (inhibitors of AP-1 are EPs in one aspect), and NF-κB. In aspects, an ITI is a PPT involved in ubiquitinylating PPTs, such as a ubiquitin ligase (DEH). An example of such an ITI is tripartite motif containing-21 (TRIM21) (in aspects a TRIM21 CEP comprises anti-viral Ag(s)).

[0690] In other aspects, ITI(s) comprise MAPK pathway PPTs or modulators thereof, e.g., p38 MAPK PPT(s). In aspects, ITI(s) comprise ERK1/2 pathway PPT(s) or modulator(s) thereof (e.g., inhibitors of such a pathway CB enhanced Th1 IR(s)/reduced Th2 responses).

[0691] ITIs can have any suitable origin/homology. In aspects, OSMGAOA ITIs in CEPs are non-Ab PPTs. In aspects, OSMGAOA ITIs are Abs or Ab FPs. In aspects, OSMGAOA Ab CEPs are intrabodies (Abs targeting intracellular targets including in the cell of expression (COE)). In aspects, an intrabody FP comprises ERTP(s). In OSMGAOA ITIMs are Ab FPs or Non-Ab FPs that comprise a cell penetrating peptide (CPP). CPPs and intrabodies that can be adapted to such aspects are discussed elsewhere here and in Singh K et al. Chem. 2019; 30(4):1028-1041. doi:10.1021/acs.bioconjchem.9b00025. PPTs comprising CPPs or certain antibody domains have been shown to be cell infiltration (e.g., anti-DNA and anti-RNA Abs, SFE Park H et al. Front Immunol. 2018; 9:2019. doi:10.3389/fimmu.2018.02019) and can be incorporated as TSs or facilitators of cell uptake. Many FPs of the invention also are taken up by other cells by TSs (e.g., gDP FPs) and can deliver EPs to intracellular targets.

[0692] In aspects, OSMGAOA PCMs are innate trained immunity cell (ITIC) internal target modulator(s) (ITICITMs). ITICITMs modulate activity of targets primarily, generally only, substantially only, or only expressed in ITICs; modulate IRs primarily, generally only, substantially only, or only in ITICS; or both. Thus, ITICITMs typically do not include ITSs, such as PTPSs, ERTPs, TFs, and the like, which exhibit expression in many cells besides immune cells and are involved in biological processes not related to IRs.

[0693] ITICITMs typically DOS bind PPTs or portions of PPTS present in the internal portions of ITICs, rather than extracellular targets (e.g., internal portions of CPCRs, cytosolic PPTs, or organelle associated PPTs). ITICITMs typically also are PCMs. Effective inclusion of ITICITM ESs (resulting in DOS IRs) in constructs is a surprising aspect of the invention. In aspects, ITICITMs in CEPs DOS induce IRs in cells in which they are expressed, in other cells, or both. Examples of ITICITMs include, e.g., STING modulators and ITIC signal transducing adaptor proteins (ITICSTAPs), e.g., EAT-2 PPTs (discussed below).

[0694] In aspects, PCM(s) comprise STING (simulator of interferon genes) modulator(s) (e.g., STING agonists), STING PPTs, or both. STING modulators, related techniques, and applicable principles are described in, e.g., US20180085432 and WO202002874. In aspects, a STING modulator(s) DOS exhibit IRs in T-cells, NKCs, monocytes, or combinations. In aspects, STING modulator(s) DOS primarily exhibits IRs in such cells. In aspects, STING modulator(s) also exhibit DOS IR(s) in lung, ovary, heart, smooth muscle, retina, bone marrow, or vagina cells. In aspects, a STING modulator EP comprises a mitochondrial ITS, such as those known in the art (SFE Diekert K et al. Proc Natl Acad Sci USA. 1999; 96(21):11752-11757. doi:10.1073/pnas.96.21.11752; Del et al. Mol Ther. 2003; 7(6):720-730. doi:10.1016/s1525-0016(03)00130-8; and Yogev 0 et al. Biochim Biophys Acta. 2011; 1808(3):1012-1020. doi:10.1016/j.bbamem.2010.07.004), a lysosome TS such as those of lamp-1, LIMPII, or MHCII invariant chain (SFE Starodubova E S, et al. Acta Naturae. 2014; 6(1):61-68; Behnke J et al. FEBS Lett. 2011; 585(19):2951-2957. doi:10.1016/j.febslet.2011.08.043; and Schrader-Fischer G, et al. 1997; 68(4):1571-1580. doi:10.1046/j.1471-4159.1997. 68/041,571.x) an ERTPS, or CT. In aspects, a STING modulator EP is a cGAS PPT (e.g., Uniprot Q8N884, I3LM39, or E1BGN7, a homolog, a chimera, a FF, or FV ofany such PPT); a TMEM203 PPT (or FF or FV) (see Yang et al. PNAS August 2019, 116 (33) 16479-16488; DOI: 10.1073/pnas.1901090116). In aspects, CEPs comprise PPTs that block proteins that block STING activity (e.g., an anti-DENV or anti-Zika virus NS2B3 PPT Ab).

[0695] In aspects, ITMs are factors in or modulators of factors in a checkpoint cascade, such as signaling mediators. E.g., CEPs can comprise PLCy1, PLCy2, and PI3K PPTs, which are signaling mediators of EAT-2/CRACC checkpoint pathway(s), e.g., in NKCs.

### b. Functional Classes of PCMs/CMs

[0696] In aspects, CMs/PCMs can be characterized on their function or primary function, such as co-stimulation/activation, inhibition, or both. In aspects, CMs/PCMs are characterized on primarily, but not exclusively, exhibiting such properties, situationally exhibiting such properties, or both. E.g., CD27 modulators activate T-cell activity, but also have been shown to inhibit Th17 IRs. In aspects, CEPs comprise both CIs and CSMs. In aspects, CCs comprise only CI or CSM CCCs. In aspects, CI or CSM IM AACs are AAW CEPESCs. In aspects, such CEPESCs comprise PCMES(s).

### 1) Checkpoint Activators (Co-Stimulatory Molecules)

[0697] In aspects, OSMGAOA PCMs in CEPs are CSMs. In aspects, OSMGAOA PCSMs are ICRLs of co-stimulatory ICRs. Examples of peptidic CSMs that can be in CEPs include 4-1BBL PPTs (e.g., a WT PPT, a FF, or a FV of either), GITRL PPTs, CD80 (B7.1) PPTs, CD28L PPTs, CD137L PPTs, ICOS ligand PPTs, CD86 (B7.2) PPTs, CD70 PPTs, H7-H7 PPTs, CD30 PPTs, CD40 PPTs, and HVEM PPTs. In aspects, CEPs comprise FFs or FVs of such PCSM(s).

[0698] Examples of PCSMs include activating modulators of GITR (CD357) (e.g., a GITRL PPT), CD28 (e.g., PD-L1 PPTs or B7-1 PPTs), or ICOS. In aspects, a PCM modulates a T-cell CSM CPCR. Examples of such PCMs include modulators of OX40 (CD134) (e.g., OX40L/CD252 PPTs), 4-1BB (CD137 (e.g., CD137L PPTs)), CD28, CD27, ICOS, and CD122. In aspects, a PCM modulates a B cell CSM CPCR (e.g., a CD40 modulator, a completement receptor modulator, a CR2 modulator (e.g., a CD19 or CD81 PPT), or CT.

### 2) Checkpoint Inhibitors and PCIs

[0699] In aspects, OSMGAOA PCMs in CEPs are peptidic CIs (PCIs). In aspects, PCM(s) exhibit DOS checkpoint inhibition effects in T-cells, NKCs, DCs, or combinations. In aspects, PCM(s) primarily, generally, or at least substantially only exhibit DOS checkpoint inhibition IRs in T-cells and NKCs. Examples of checkpoint inhibitors include CTLA-4 (CD152), PD-1/PD-L1 (CD274) or PD-L2 (CD273) checkpoint inhibitors. Other examples of checkpoint inhibitors include PCMs that inhibit a LAG-3 (CD223) or KIR (CD158) checkpoint, or that inhibit a TIM-3, TIGIT, Galectin, Poliovirus receptor (CD155), or 4-1BB (CD137) checkpoint pathway, or combinations of any of these or other CIs described in this disclosure or known in the art. CIs and CI ligands that can be adapted for inclusion in CEPs are described in, e.g., Chen L, Flies DB. Molecular mechanisms of T cell co-stimulation and co-inhibition [published correction appears in Nat Rev Immunol. 2013 July; 13(7):542]. Nat Rev Immunol. 2013; 13(4):227-242. doi:10.1038/nri3405.

[0700] In aspects, as discussed further herein, gDPs of CEPs can act as checkpoint inhibitors, DOS inhibiting the HVEM/BTLA checkpoint pathway. In aspects, CEPs comprise both gDP CI(s) and NGDCI(s). In aspects, CEPs only comprise gDP CI(s). In aspects, the only type of PCMs in CEPs are gDPs. In aspects, CEPs comprise gDP CI(s) and PCSM(s) (e.g., 4-1BB pathway CSMs or GITR pathway CSMs). In aspects, gDPs of a CEP do not act as CIs in TRs (e.g., gDPs do not block HVEM in non-HVEM-expressing TRs, such as pigs). In aspects, the only EPs with CI function are NGDCIs. Examples of NGDCIs are discussed above and throughout this disclosure and include, e.g., LAG-3 CIs, TIM-3 CIs, and KIR CIs.

### b. Signal Transducing Adaptor Protein PCMs (ICSTAPs & CPSTAPs)

[0701] In aspects, OSMGAOA PCMs in CEPs are signal transducing adaptor protein(s) (STAPs) that DOS modulate IC activities (ICSTAPs) or a modulators of such proteins (e.g., in the case of inhibitor STAP(s)). In aspects, OSMGAOA of the PCMs of a CEP are STAP(s), STAP modulators, or both, that modulate checkpoint pathway(s) (i.e., CPSTAPs or CPSTAPMs). In aspects, PCMs can be classified as both (1) immune cell STAPs (ICSTAP(s)) due to primary expression in ICs and (2) CPSTAP(s). In aspects, a PCM is a modulator of an ICSTAP, CPSTAP, or both. In aspects, an ICSTAP EP induces IRs. In aspects, a CPSTAP activates IRs in ICs. In aspects, an ICSTAPM/CPSTAPM blocks/inhibits an inhibitory STAP in a CI or CI-like manner, resulting in induced IRs.

[0702] STAPs (a.k.a. “adaptor proteins” sometimes presented as “adapter” proteins) are PPTs that modulate signal transduction pathways, such as ITIM-mediated pathways (discussed above), ITAM pathways, or other pathways. STAPs are characterized in typically lacking intrinsic catalytic activity, functioning instead by inducing PPT-PPT interactions (e.g., between effectors and enzymes) to form PPT complexes, modifying (e.g., nucleating) such complexes, or both, and thereby causing signal transduction event(s). Adaptor proteins typically are multi-domain PPTs & contain protein-binding motif(s), which facilitate interactions between protein-binding partners & the generation of such enhanced signaling complexes. Adaptor proteins can govern signaling cross-talks in time and space. STAPs typically exhibit subcellular localization.

[0703] In aspects, ICSTAP(s) in CEPs DOS coordinate signal transduction cascades controlling effector function(s) in ICs including motility, activation, proliferation, and differentiation in IC type(s). In aspects, STAP EPs DOS modulate one or more immune checkpoints and, accordingly, are CPSTAP(s).

[0704] Examples of WT STAPs include adaptor protein complex 3 (AP-3), which is required for the efficient presentation of glycolipid antigens that require internalization and processing. STAP DAP10 stimulates survival and cytotoxicity of NK cells and provides co-stimulation to activated T cells. STAP DAP12 possesses an immunoreceptor tyrosine-based activation motif (ITAM) which, after phosphorylation, recruits Src family kinases ZAP70 and Syk, responsible for cytokine release and enhancement of cytotoxicity in NK cells. Another type of an adaptor is a slp-76 family adaptor. STAP Slp-76 is expressed in T cells, monocytes/macrophages, NK cells, mast cells and platelets. BLNK reflects the slp-76 homolog in B cells (sharing similar domain structure and 33% identity) and is primarily responsible for the transmission of signals through the B cell receptor (BCR). Other known IM adaptor proteins include Nck and Itk (which impacts survival, development and cytokine production of NKT cells). In NK cells, the DAP-12 adaptor (that acts on KIRs in heterodimeric complexes and TREM-1), the AP2 clathrin adaptor (which mediates KIR endocytosis) the Crk adaptor (which in unphosphorylated form can overcome KIR inhibition), and the EAT-2 activator (that acts on SLAM family receptors to activate NK cell activity). Among the three ITAM-bearing adaptor molecules, FcRγ and CD3ζ chains associate with CD16, NKp30 and NKp46 receptor by forming either homodimers or heterodimers, whereas DAP12 associates with the NKp44 receptor. Innate immune receptor-associated adaptors include MyD88 or TRIF, which are known to induce IR(s). TNFa CPCRs are modulated by TRAF adaptors, which can be incorporated in CEPs. Numerous other examples of adaptor proteins are known in the art. EPs can comprise any suitable type of adaptor protein PPT or AARS or combination of adaptor protein PPTs or AARSs, including 1+ of the adaptors mentioned here.

[0705] In aspects, OSMGAOA of STAP CEPs are transmembrane adaptor proteins (TRAPs), such as WT TRAPs, FFs of TRAPs (soluble or nonsoluble), or FVs thereof. Examples of TRAPs include LAT, NTAL (non-T-cell activation linker), PAG (protein associated with glycosphingolipid-enriched microdomains) and LIME (LCK-interacting membrane protein), TRIM (TCR-interacting molecule), SIT (SH2-domain-containing protein tyrosine phosphatase (SHP2)-interacting transmembrane adaptor protein) and LAX (linker for activation of X cells, where X denotes an as yet unidentified cell). In aspects, a PCM comprises an inhibitor of an inhibitor TRAP. In aspects, a PCM comprises a stimulatory TRAP PPT or a modulator of a stimulatory TRAP PPT that DOS induces IRs. In aspects, a TRAP PPT is of or is related to a lipid raft-associated TRAP PPT or a TRAP modulator acts on such a TRAP PPT. In aspects, a TRAP PPT is a non-lipid raft associated TRAP or a modulator of such a TRAP. TRAPs are reviewed in, e.g., Holejsi, V et al. Nat Rev Immunol 4, 603-616 (2004). https://doi.org/10.1038/nril4l4.

[0706] In aspects, CPSTAP(s)/ICSTAP(s) are expressed in ITICs. Examples of such STAPs include the adhesion and degranulation-promoting adapter protein (ADAP) expressed in NKCs and DOS modulating IRs (such as priming, cytokine production, & cytotoxicity). B cell activating STAPs include NCK which is involved in Ab functions & processing of large Ags. In aspects, ICSTAPs/CPSTAPs modulate T-cell activity. Examples of such STAPs include CG-NAP/kinase, which modulates T cell activation, proliferation, differentiation, & migration; the Grb2-related adaptor downstream of Shc (Gads) that modulates T cell-mediated immunity; and adaptor protein Shc, which interacts with Gads. Additional adaptors that modulate T cell pathways/functions include the zeta (Q-chain associated protein of 70 kDal (Zap-70) and the linker for activation of T cells (LAT). CEPs can comprise any such STAP, or FF or FV.

[0707] In aspects, a STAP EP modulates IRs in multiple IC types, interacts with multiple PPTs involved in IRs, or both. The adaptor SLP-76, for example, modulates both NK cell activating receptor functions and NKT cell functions, such as selection, differentiation, and activation. Several proteins involved in IRs, signal pathways, or both, are modulated by 1, 2, or more STAPs. E.g, PI3K, which modulate signaling pathways downstream of immunoreceptor engagement are engaged by STAP B-cell adaptor for PI3K (BCAP) in B cell modulation and the adaptors SLP-76 and LAT in T cell modulation, and SLP-76 also modulates Vav family proteins in NK activating signal transduction. Similarly, SH2 domain-containing inositol 5′-phosphatase (SHIP) which both regulates the P13K pathway and CD4 signal pathways is modulated by adaptors Dok-1/2 (Waterman P M et al. Immunol Lett. 2012; 143(1):122-130. doi:10.1016/j.imlet.2012.02.009). Like SLP-76 adaptors, Crk STAPs (Crk, CrkII, Crk I, v-Crk, or CrkL-SFE Birge, R. B et al. Cell Commun Signal 7, 13 (2009). https://doi.org/10.1186/1478-811X-7-13) modulate numerous PPTs (e.g., p130cas, p120-C-Cbl, Cbl-b, NKG2D, Abl, Gab3, ZAP70, HPK1, SDF-1, C3G, BCR, KIRs, and P13K to modulate IRs in T, B, and NK cells, including T-cell activation and NK cell activation. CEPs can comprise any of these or functionally similar STAPs, FFs, or FVs. ICSTAPs FcR-γ & DAP12 modulate activity of a number of ICRs, in some cases inhibiting activity (e.g., in NKp44) and in other activating activity (e.g., Dectin-2 & TREM-2) (SFE Hamerman J A et al. Immunol Rev. 2009; 232(1):42-58. doi:10.1111/j.1600-065X.2009.00841.x)

[0708] In aspects, CEPs comprise 2+ ICSTAPs, CPSTAPs, or both, which interact in TR immune systems (e.g., Crk and dok1). In aspects, an adaptor primarily, generally only, substantially only, or only exhibits effects in ITICs, AICs, or both cell types. In AOTI, CEPs comprise TRAF adaptor STAP(s). In AOTI, STAP(s) comprise PPT(s) that block c-Cbl, Cbl-b, or both.

[0709] In aspects, CEPs comprise STAPs that modulate ICRS of the signaling lymphocyte activation molecule (SLAM) family. In aspects, OSMGAOA of PCPMs in CEPs are adaptor(s) of a SLAM receptor. In aspects, OSMGAOA SLAM receptor adaptors (SLAMRAs) contain SH-2 motif(s), contain cytoplasmic ITIMs, are tyrosine phosphorylated PPTs, or exhibit a combination thereof. In aspects, PCMs are STAP(s) that modulate a SLAM receptor that is regularly expressed in DCs (e.g., SLAM1, SLAM2, SLAMF5, or SLAMF7).

[0710] In aspects, CEP PCMs are STAP(s) that DOS modulate SLAMF5/CD86, SLAMF7/CRACC, or both. In aspects, such STAPs primarily induce IRs. WT SLAM-modulating STAPs include SAP (SLAM-associated protein—also named SH2D1A), Ewing's sarcoma-associated transcript-2 (EAT-2; also named SH2D1B1) & EAT-2-related transducer (ERT; also named SH2D1B2) (“SAP family adaptors” or SAPFAs). In AOTI, PCMs comprise WT SAPFAs or SAPFA FPs comprising WT SAPFA AARSs. In AOTI, PCMs comprise FFs of SAPFAs in NFPs or FPs. In AOTI, PCMs comprise FVs of SAPFAs in NFPs or FPs. In aspects, OSMGAOA SAPFAs in CEPs are in FPs. In AOTI, OSMGAOA SAPFAs in CEPs are contained in gDPFPs (gdFPs). In aspects, OSMGAOA SAPFAs in CEPs are EAT-2 PPTs (e.g., EL WT EAT-2s, FFs thereof, or FVs). In aspects, EAT-2 PPTs are hEAT-2 PPTs (EL WT hEAT-2, FFs thereof, or FVs thereof).

### c. CMCR Family Characteristics

[0711] In aspects, PCMs can be characterized on the basis of the structural characteristics of the CPCRs involved in the checkpoint pathway. In aspects, PCMs are ligands of such CPCRs. In aspects, PCMs are CPCRs (e.g., CPCRs that bind other CPCRs, CPCRs that are self-ligands, such as self-ligand SLAM CPCRs, or soluble forms of CPCRs, either WT soluble forms or soluble FFs/FVs of non-soluble CPCRs). In aspects, PCMs modulate B7/CD28 family/superfamily CPCR pathway(s). In aspects, PCMs modulate immunoglobulin CPCR pathway(s). In aspects, PCMs modulate TNF superfamily CPCR pathways. In aspects, CEPs comprise PCMs that modulate checkpoint pathways involving CPCRs of two of these families/superfamilies (“families”). In aspects, CEPs comprise PCMs that modulate checkpoint pathways involving CPCRs of all three families. In aspects, CEPs comprise two or more PCMs that modulate two or more CPCRs in at least one of these families (e.g., two or more PCMs that modulate TNF superfamily CPCRs or 2+ PCMs that modulate B7 family CPCR pathways and 2+ PCMs that modulate immunoglobulin superfamily CPCR pathways). The characteristics of such CPCR families and modulators are briefly discussed below. The art sometimes characterizes the B7 and immunoglobulin families as a single family as these families share similar structural characteristics. AOTI can accommodate either treatment of such receptors, but this disclosure adopts the treatment of these two classifications as separate families.

### 1) B7/CD28 Family

[0712] In aspects, PCMs include modulators of a B7 CPCR pathway. The CD28/B7 family CPCR pathway includes CD28 and CTLA-4 and their ligands B7.1 (CD80) and B7.2 (CD86); ICOS and ICOS ligand (ICOSL); and the coinhibitory receptor Programmed Death Receptor 1 (PD-1) and its ligands PD-L1 and PD-L2; the CD28 homolog member B and T lymphocyte attenuator (BTLA); and 2 B7 homologs B7-H3 and B7-H4 (B7×, B7S1).

[0713] Some in the art divide the B7/CD28 superfamily between B7 family CPCRs/ligands, e.g., B7-1 (CD80), B7-2 (CD86), B7-H2 (ICOSL), programmed death ligand 1 (PD-L1), programmed death ligand 2 (PD-L2), B7-H3, B7-H4, B7-H5, B7-H6, and B7-H7 and CD28 family CPCRs/CPRLs, e.g., CD28, CTLA-4, ICOS, PD-1, and B- and T-Lymphocyte Attenuator (BTLA). Additional members of this PPT family include ILDR2 (Hecht I et al. 2018; 200(6):2025-2037. doi:10.4049/jimmunol.1700325)

[0714] In aspects, OSMGAOA B7/CD28 family CPCR pathway PCMs are PPTs of or related to or are modulators of B7 family CPCR pathways or PPTs. In aspects, OSMGAOA B7CD28 family CPCR pathway PCMs in CEPs are PPTS of or related to or are modulators of CD28 family CPCR pathways or PPTs

[0715] In aspects, B7 CPCR pathway modulating PCM(s) modulates a costimulating pathway (e.g., the CD86/CD28 pathway), an inhibitory pathway (e.g., CD80/CTLA4), or both. In aspects, PCMs block activity of inhibitory B7 CPCR pathways (e.g., B7-H3). Other PPTs in the B7 family CPCR that can be or can be modulated by PCMs include, e.g., B7-H6, B7-H7/HHLA2, PDCD6, TMIGD2/CD28H, VISTA/B7-H5/PD-1H, Nkp30, TMIGD2, HHLA2, CD276, B7-DC, B7-H5, and CD272. Homologs of such factors occur in several species (SFE Chen W et al. PLoS One. 2011; 6(6):e21341. doi:10.1371/journal.pone.0021341, with respect to porcine B7-H3, which in one aspect is blocked/inhibited by a PCM that modulates this pathway). In aspects, B7/CD28-related PCM(s) in CEPs DOS induce T cell activation, T cell proliferation, IC cytokine production, promotion of TC survival, B cell activation, Th cell differentiation, IC cytotoxicity (e.g., NKC-mediated cytotoxicity, CTL-mediated cytotoxicity, or both), or combinations of any/all thereof.

### PD-1 Pathway Modulating PCMs

[0716] In aspects, PCMs comprise a member or modulator of a PD-1 checkpoint pathway. In aspects, PCMs comprise a PD-L1-binding PPT, a PD-L2 binding PPT, or both. In aspects, PCMs comprise inhibitors of a PD-1 pathway. In aspects, PCMs comprise PD-L1 Abs or Ab FPs. In aspects, PCMs comprise non-Ab PD-L1 binding PPTs. In aspects, PCMs comprise multimeric non-Ab PD-L1 trap proteins. In aspects, a PCM comprises a FF of a PD-1, such as a PD-L1 extracellular binding domain (or a FV thereof). In aspects, PCMs comprise a PD-1 PPT or other PD-1 modulator, such as a PD-1 extracellular binding domain (or a FV thereof). PD-1/PD-L1 PPTs and modulators thereof are known. E.g., PPTs comprising extracellular domains of PD-1/PD-L1 are described in, e.g., Zhu Y P et al. Can. J. Vet. Res. 81 (2), 147-154 (2017) and anti-PD-L1 Abs are described in, e.g., WO2013079174; CN101104640; WO2010036959; WO2013056716; WO2007005874; WO2010089411; WO2010077634; WO2006133396; WO201309906; US 20140294898; WO2013181634 and WO2012145493. In aspects, PCMs are endogenously expressed in TRs or a RVRHR or SI to CIs endogenously expressed in TRs. E.g., in aspects TRs are pigs and CEPs comprise a PD-1 or PD-L1 PPT or modulator that is expressed in pigs, such as an extracellular domain of a PD-1 or PD-L1 PPT.

### CTLA-4 Pathway Modulating PCMs

[0717] In aspects, a PCM is a member or modulator of a CTLA-4 checkpoint pathway. In aspects, PCM(s) block CTLA-4 to CD80 (B7-1) and/or CD86 (B7-2). In AOTI, the CTLA-4 AARS or PPT comprises at least a portion of an anti-CTLA-4 Ab, such as ipilimumab or ticilimumab. Such Abs are described in, e.g., WO2001014424; WO2012120125; WO2009100140; WO2007123737; WO20100979597; WO200612168; U.S. Pat. Nos. 6,682,736; 6,207,156; 6,984,720; 7,109,003; and 7,132,281; or comprises AARSs of a CTLA-4 ligand (SFE WO1996040915). In aspects, inclusion of a PCM that blocks a CTLA-4 pathway DOS enhances IRs, such as T-cell or NKC IRs, e.g., T-cell activation, enhanced NKC cytotoxicity, or both, and in anti-cancer applications can DOS exhibit enhanced tumor/TME-infiltration of T cells (e.g., CD8 cells), NKCs, or both.

### VISTA Pathway Modulating PCMs

[0718] In aspects, CEPs comprise PCM(s) that modulate a V-domain Ig suppressor of T cell activation (VISTA) pathway (sometimes VISTA is also referred to as B7-H5, although HHLA2 also has been described as B7-H5). In aspects, such PCM(s) DOS induce T-cell IR(s). In aspects, PCM(s) block VISTA pathway(s). In aspects, such PCM(s) comprise anti-VISTA Abs or Ab FPs. Anti-VISTA Abs are known in the art (e.g., NCT02671955) (see also Deng J et al. J Immunother Cancer. 2016; 4:86. doi:10.1186/s40425-016-0190-5).

### (a) Butyrophilin CPCR Family Modulators

[0719] In aspects, PCMs modulate a checkpoint pathway associated with a Butyrophilin family CPCR. These CPCRs are sometimes classified as B7 family CPCRs. Examples of such CPCRs include BTN1A1/Butyrophilin, BTN2A1, BTN2A2/Butyrophilin 2A2, BTN3A1/2, BTN3A2, BTN3A3, BTNL2/Butyrophilin-like 2, BTNL3, BTNL4, BTNL6, BTNL8, BTNL9, BTNL10, and CD277/BTN3A1. In aspects, PCMs block the action of inhibitory Butyrophilin pathway(s) (e.g., a BTN1A1, BTN2A2, or BTNL2). In aspects, PCMs activate stimulating Butyrophilin pathway(s). In aspects, PCMs comprise a BTN3A PPT, which in aspects DOS promotes DC survival. The biology of such CPMs is discussed in, e.g., Malinowska M et al. Cent Eur J Immunol. 2017; 42(4):399-403. doi:10.5114/ceji.2017.72806. In aspects, Butyrophilin pathway PCMs DOS modulate CD4 T-cell activity.

### (b) ILTICD85 (LIR/ILIR) CPCR Family Modulators

[0720] In aspects, PCMs comprise ILT/CD85-ILIR (Inhibitory leukocyte immunoglobulin-like receptor A/B) CPCR modulator(s) (also described as or overlapping with Leukocyte immunoglobin-like receptor (LIR) CPCR pathway). In aspects, such PCMs DOS induce T-cell IRs. Examples of such CPCRs and associated ligands include LILRA1/CD85i, LILRA2 (ILT1)/CD85h, LILRA3 (ILT6)/CD85e, LILRA5/CD85f, LILRA6/CD85b, LILRA4/CD85g/ILT7, LILRB1/CD85j/ILT2, LILRB2/CD85d/ILT4, LILRB3/CD85a/ILT5, and LILRB4/CD85k/ILT3. Modulators of such CPCRs include Angiopoietin-like (ANGPTL) proteins (e.g., human Angiopoietin-1, Angiopoietin-2, and Angiopoietin-4). In aspects, PCMs block ILT2 pathway(s) and exhibit DOS NKC IRs, e.g., DOS enhanced IFN-γ production. In aspects, PCM(s) block inhibitor LIR/ILT pathway(s). In aspects, such PCMs are combined with heterologous PCMs. E.g., CEPs can comprise anti-LIR-1 PCMs and anti-NKG2A PCMs and such PCMs can DOS induce NKC IR(s).

### 2) Immunoglobulin superfamily

[0721] In aspects, CEPs comprise PCM(s) that are of, are related to, or are modulators of immunoglobulin CPCR superfamily pathway(s). Examples of such CPCRs/modulators include CEACAMI (self-ligand), CD96/CD155, and other examples described herein. In aspects, PCMs that modulate immunoglobulin CPCR superfamily pathways DOS induce IRs. In aspects, such PCMs comprise ligands of an activating immunoglobulin CPCR superfamily receptor, e.g., a Nectin-2/CD112 PPT or a CD48/BCM1 PPT.

[0722] In aspects, PCMs do not comprise any Nectin family PPTs that are bound by gDPs in CEPs. E.g., in an aspect, a CEP comprises a Nectin-2/CD112R PPT PCM and no gDPs that exhibit significant binding to Nectin-2. In aspects, PCMs do not comprise Nectin family PPTs. In aspects, such PCMs do not comprise PCMs that modulate both activating & inhibiting CPCR pathways (e.g., Nectin-2 and PVR).

### (a) LAIR CPCR Family Pathway Modulators

[0723] In aspects, OSMGAOA PCM(s) in a CEP modulate a LAIR Family CPCR checkpoint pathway. Examples of such CPCRs include LAIR1, LAIR2, CD96, CD155/PVR, CRTAM, DNAM-1/CD226, PVRIG, and TIGIT. Nectin and Nectin-like Ligand/Receptor Co-Signaling Molecules, Nectin-2/CD112, and Nectin-3 also have been associated with the LAIR family and checkpoint pathways (e.g., Nectin-2/PVR/CD112R, is a ligand for TIGIT, a well-established CI). Nectin-4 also has been associated with possible CI functions. In aspects, CEPs comprise one or more PCMs that are or modulate a LAIR CPCR Family pathway, such as targets described here. In aspects, CEPs do not comprise any Nectin PPTs that are bound by gDPs In aspects, PCMs do not include Nectin PPTs. In aspects, PCM(s) bind Nectin PPTs. In aspects, PCMs in CEPs do not include Nectin-binding PCMs.

### * CD112/CD112R (PVR/Nectin-2)

[0724] In AOTI, PCM(s) modulate the CD112R CPCR pathway. In aspects, PCM(s) block CD112R-CD112 interactions. In aspects, such PCMs DOS enhance TC activity. In aspects, such PCM(s) are Abs or Ab FPs. In aspects, such PCMs are non-Ab FPs. Non-Ab FP CD112R CIs can comprise soluble CD112/Nectin-2/PVRL2 PPTs. In AOTI, non-Ab FP CD112 PCMs are CD112R trap PPTs. In AOTI, PCM modulators of the CD112R/CD112 pathway DOS enhance IC IFN-γ- or IL-17 production. In AOTI, CEPs comprising such PCMs exhibit DOS recruitment/concentration or IRs mediated by DCs, monocytes, or both.

[0725] In aspects, a Nectin-2 PCM exhibits T cell stimulation effects. In aspects, a CEP comprises both Nectin-2 PPT(s) and CD155/PVR/Necl-5 PPT(s) and DOS stimulate T cells. In such aspects, PCMs can further comprise PPTs that block CD112R, TIGIT, or both.

[0726] In aspects, CEPs comprise PCMs that block both CD112R and TIGIT. Modulation of CD112R & TIGIT is described in, e.g., Xu F et al. Cancer Immunol Immunother. 2017; 66(10):1367-1375. doi:10.1007/s00262-017-2031-x.

[0727] Aspects of such CIs that can be adapted to these AOTI are discussed in, e.g., Zhu Y, Paniccia A, Schulick A C, et al. J Exp Med. 2016; 213(2):167-176. doi:10.1084/jem.20150785. A CD112R epitope AVLHPERGIRQWAPARQ (SEQ ID NO:732) can be bound by CD112R-modulating PCMs, as described in US20170240613A1.

### ** TIGIT and CD96 CPCR Pathway Modulators

[0728] In aspects, CEPs comprise PCMs that modulate a TIGIT (T cell immunoreceptor with immunoglobulin and ITIM domains) pathway or a CD96 pathway. In aspects, PCM(s) block TIGIT pathway(s). In aspects, PCM(s) activate CD96 pathway(s).

[0729] In aspects, PCMs DOS inhibit CD155 binding to TIGIT, In aspects, such PCMs can DOS exhibit enhanced CD155 (PVR) binding to activating CPCR CD226. In aspects, PCMs block CD155/PVR interactions. In aspects, PCMs block all three of PVR, TIGIT, and CD96 from interactions. In aspects, PCMs that block TIGIT pathway(s) exhibit DOS IRs in NKCs, T-cells (e.g., CTLs), or both. In aspects, such PCMS DOS reduce T-cell exhaustion. In aspects, such PCMs DOS induce enhanced cytokine production (e.g., IFNg or TNF-alpha). In aspects, such CEPs comprise anti-cancer Ags.

[0730] In aspects, PCM inhibitor(s) of TIGIT or combinations are Abs or AbFPs. Such Abs are known in the art (SFE Chen F et al. Cancer Med. 2020; 9(10):3584-3591. doi:10.1002/cam4.2976) and anti-TIGIT Abs are commercially available. In aspects, such inhibitors are non-Ab ligands, such as multimeric trap PPTs. In aspects, CEPs comprising OSMOA of such PCMs also include PCM(s) that block PD-1 pathway(s).

[0731] In aspects, PCM(s) comprise CD96 PPTs or activators of a CD96 pathway. In aspects, such PCMs DOS enhance T cell IRs (e.g., T cell differentiation or cytokine levels).

[0732] In aspects, PCM(s) comprise CD226 activating PCMs.

### (b) TIM CPCR Family Pathway Modulators

[0733] In aspects, CEPs comprise modulators of a TIM CPCR pathway (e.g., TIM-1/KIM-1/HAVCR, TIM-3, Galectin-9, HMGB1, CEACAM-1, TIM-2, H-ferretin, Semaphorin 4A, and TIM-4. In aspects, CEPs comprise PCM(s) that modulate the TIM-3 3 (T-cell immunoglobulin and mucin domain 3) pathway. In aspects, PCM(s) comprise TIM-3 ligands. In aspects, TIM-3 ligand(s) comprise TIM-3 Abs or Ab FPs (such Abs are known—e.g., Sym023, Cobolimab, LY3321367, BGB-A425, and MBG453). In aspects, TIM-3 ligand(s) comprise TIM-binding traps. In aspects, TIM-3 ligands comprise Galectin-9, HMGB1, or CEACAM-1 PPTs. In aspects, such CEPs exhibit DOS IRs in DCs, T-cells, NKCs, NKTCs, myeloid cells, or combinations.

### (c) SIRP CPCR Family Modulators

[0734] In aspects, PCM(s) comprise modulator(s) of a SIRP CPCR family receptor pathway. Examples of such CPCRs include signal regulatory protein-α (SIRPa or SIRPa—a.k.a. CD172a). Other SIRP CPCRs include SIRP beta1, SIRP beta2, and SIRP gamma. CEPs comprising PCM(s) that modulate 1+ of such pathways are an aspect of the invention. In aspects, PCM(s) inhibit a SIRP CPCR, e.g., binding to the CPCR, its ligand (CD47, another CPCR), or both. Such PCM(s) can be anti-SIRP or anti-CD-47 Abs or Ab FPs. Such Abs are known in the art (e.g., Magrolimab (Hu5F9-G4) is a known anti-CD47 Ab). Such PCMs can be SIRP-binding trap PPTs. In aspects, such PCM(s) induce DOS IRs in DCs, macrophages, or both. In aspects, such PCMs DOS promote DCA-associated cell phagocytosis. In aspects, such PCMs DOS enhance NKC activity. Such CPCRs are described in, e.g., Li C W et al. Front Med. 2018; 12(4):473-480. doi:10.1007/s11684-018-0657-5.

### (d) KIR CPCR Family Modulators

[0735] In aspects, CEPs comprise modulator(s) of KIR (killer cell immunoglobulin-like receptors) Family CPCR(s). KIR CPCRs include inhibitory KIR2DL1, KIR2DL2, & KIR2DL3 CPCRs. Other KIRs are activating CPCRs. In AOTI, PCM(s) are modulator(s) of inhibitor KIR(s). In aspects, PCM(s) are modulator(s) of activating KIR(s). In AOTI, PCMs comprise anti-KIR Abs or Ab FPs, anti-KIR-ligand Abs or Ab FPs, or CT. Examples of such Abs are described in, e.g., US20120208237 or are KITA (e.g., Lirilumab (1-7F9, IPH2101)).

### (e) Natural Cvtotoxicity Receptor Pathway Modulators

[0736] In aspects, CEPs comprise PCM(s) that modulate a natural cytotoxicity receptor (NCR) pathway. NCRs are classified as NKp46, NKp44, or NKp30 CPCRs, but isoforms of such CPCR(s) can exist with different properties. E.g., NKp30 isoforms NKp30a and NKp30b evoke NKC activation, the NKp30c isoform was shown to elicit secretion of the immunosuppressive cytokine, IL-10 from NKCs. As suggested by the preceding, NCRs comprise both activating and inhibiting CPCRs and, accordingly, PCMs can block inhibitor NCR pathway(s), induce activating NCR pathway(s), or both. Some NCRs, e.g., NKp44-1, exhibit situational inhibition/activation dependent upon association with other PPTs, notably the STAP DAP12 (which leads towards NKp44-1 activation of IR(s), particularly in NKCs). In aspects, PCMs comprise modulators of at least 2 NCRs. In aspects, PCMs comprise ≥1 NCR modulating PCM and ≥1 heterologous PCM, such as a PD-1 pathway blocking PCM. In aspects, PCM(s) block inhibitor NCR(s), ligand(s) of such NCRs, or both. Ligands of inhibitory NCRs are known and include B7-H6 PPTs, Nidogen-1 PPTs, and Galectin-3 PPTs. In aspects, PCM(s) comprise Abs or Ab FPs against such ligand, inhibitory NCRs, or both. In aspects, PCM(s) comprise ligands of activating NCRs, such as PDGF-DD PPTs or agonistic Abs against such CPCRs. DCA-associated PPTs, such as influenza HA/HN PPTs also have been shown to modulate NCRs and can be used as PCMs, Ags, or both. Aspects of such ligands and modulation of NCRs is known and such knowledge can be applied to AOTI (SFE Barrow A D et al. Front Immunol. 2019; 10:909. Published 2019 May 7. doi:10.3389/fimmu.2019.00909 and Kruse P H et al. Immunol Cell Biol. 2014; 92(3):221-229. doi:10.1038/icb.2013.98). In aspects, PCMs include an ITICSTAP that promotes activation of an activating NCR, e.g., a DAP12 PPT (a WT PPT, FF, or FV). In aspects, CEPs comprise ITICITMs that are NCR modulators or PPTs that can act as both ITICIMs and as cell surface PPTs or PPTs that modulate such PPTs (e.g, intrabodies against such targets in the case of inhibitory ITICITMs. Intracellular ligands modified by NCRs include HLA-B-associated transcript 3 (BAT3), proliferating cell nuclear antigen (PCNA), internal Ag(s) such as HIV gp41, mixed-lineage leukemia protein-5 (MLL5), and NKp44L and PCMs can comprise either such PPTs or modulators thereof (e.g., blocking intrabodies).

### (f) SLAM CPCR Family Modulators

[0737] In aspects, CEPs comprise PCM(s) that modulate a pathway of a signaling lymphocyte activation molecule (SLAM) CPCR family. Examples of SLAM CPCRs include SLAM/SLAMF1, CD48/SLAMF2, CD58/LFA-3, CD229/SLAMF3, 2B4/CD244/SLAMF4, CD84/SLAMF5, NTB-A/SLAMF6, CRACC/SLAMF7, BLAME/SLAMF8, CD2F-10/SLAMF9, and CD2. PCM(s) can modulate any aspect of such pathway(s). Additional SLAMF members & related PPTs are discussed elsewhere and are described in, e.g., O'Connell P et al. Vaccines (Basel). 2019; 7(4):184. Published 2019 Nov. 16. doi:10.3390/vaccines7040184. Most SLAM ICRs (SLAMF, 3, 5, 6, & 7) are self-ligands (SLAMF2 and SLAMF4 are ligands for each other). The use of such PPTs and related ESs (and the same WRT other SLAM ICR modulators) as PCM(s) is an AOTI. In aspects, OSMGAOA of PCPMs in CEPs are adaptor(s) of a SLAM receptor. In aspects, OSMGAOA SLAM receptor adaptors (SLAMRAs) contain SH-2 motif(s), contain cytoplasmic ITIMs, are tyrosine phosphorylated PPTs, or exhibit combinations. In aspects, such CEPs induce DOS IRs in NKCs, CD8+ T cells, NKT cells, γδ T cells, monocytes, basophils, eosinophils, DCs, thymocytes, basophils, macrophages, B cells, or mast cells, or combinations.

[0738] In aspects, PCM(s) comprise a SLAM4 pathway PCM and one or more anti-viral Ags. In aspects, PCM(s) are SLAMF5 modulators. In aspects, such PCM(s) DOS induce enhanced IL-1B, IL-23, or IL-12 expression. In aspects, such CEPs comprise anti-viral Ags. In aspects comprising SLAM4 pathway or SLAM5 pathway PCMs, IRs can comprise DOS reduction of T cell exhaustion. In aspects, CEPs comprising viral Ag(s) comprise PCMs that block the SLAMFI pathway, SLAMF3 pathway, or both. In aspects, any of such CEPs DOS enhance IFNg expression, DC activity (e.g., IL-12 or IL-8 secretion), B cell activity, NKC cytotoxicity, T cell activity, or CT. In AOTI, CEPs comprise PCMs that DOS modulate 2+ SLAM CPCR pathways (e.g., SLAMF7 and SLAMF5).

[0739] In aspects, PCMs are STAP(s) that modulate a SLAM receptor that is regularly expressed in DCs (SLAMF, SLAMF2, SLAMF3, SLAMF5, SLAMF6, SLAMF7, & SLAMF9). In aspects, PCMs are STPAP(s) that modulate SLAM1, SLAM2, SLAMF5, SLAMF7, SLAMF8, or SLAMF9, which are associated with higher levels in DCs. In aspects, PCM(s) are STAP(s) that modulate SLAM(s) in NKC(s) (e.g., SLAMF4) or both NKCs & DCs (SLAMF2, SLAMF3, SLAMF5, SLAMF7, or SLAMF8). SLAM-associated STAP PCMs are discussed elsewhere here and, e.g., Veillette A. Immunol Rev. 2006; 214:22-34. doi:10.1111/j.1600-065X.2006.00453.x; Cruz-Munoz, M., et al. Nat Immunol 10, 297-305 (2009). https://doi.org/10.1038/ni.1693; and Tassi I et al. J Immunol Dec. 15, 2005, 175 (12) 7996-8002; DOI: https://doi.org/10.4049/jimmunol.175.12.7996. In aspects, PCM(s) comprise both SLAM CPCR-modulating STAP(s) (e.g., SAP PPTs or EAT-2 PPTs) and SLAM CPCR extracellular ligand(s) (e.g., CRACC PPTs). In aspects, OSMGAOA SLAM pathway modulator(s) in CEPs are SLAM CPCR STAP(s), e.g., EAT-2 PPTs. In aspects, CEPs comprise PCMs that block SLAMF7 inhibition of ICs, such as TCs (e.g., PPTs that block SLAMF7 inhibitory pathway modulators that are specific to T-cells and not expressed in significant amounts in DCs). In aspects, PCM(s) comprise modulators of SLAM STAP(s), such as PPTs that bind and block the functioning of EAT-2 PPTs, SAP PPTs, or both.

[0740] In aspects, SLAM pathway PCM(s) comprise anti-SLAM or anti-SLAM ligand Abs or Ab FPs. In aspects, Ab FPs comprise Fc domains. An example of such an Ab FP is a CRACC-Fc FP described in references cited herein. Anti-SLAM Abs that induce IRs are known and include, e.g., Elotuzumab (SFE Pazina T et al. Oncoimmunology. 2017; 6(9):e1339853. Published 2017 Jun. 16. doi:10.1080/2162402X.2017.1339853; Aldhamen Y A et al. Vaccine. 2016; 34(27):3109-3118. doi:10.1016/j.vaccine.2016.04.068; and Malaer J D et al A J Cancer Res. 2017; 7(8):1637-1641). In aspects, SLAM pathway PCM(s) are non-Ab PPTs. In aspects, SLAM pathway PCM(s) are multimeric trap proteins (e.g., a SLAM7 trap, a SLAM4 trap, or a SLAM5 trap).

### (g) Other Ig Family CPCR Pathway Modulators

[0741] In aspects, CEPs comprise other PCM(s) that modulate other immunoglobulin superfamily CPCR pathway(s) not associated with any of above-described family. Examples of such PCMs/pathways are described here.

### LAG-3 Pathway Modulating PCMs

[0742] In aspects, PCMs comprise LAG-3 CMs. Lymphocyte activation gene 3 (LAG-3; also known as CD223) is known to modulate regulatory T cells (TRegs) and suppresses CD8 T cells. In aspects, PCMs block one or both LAG-3 effects. Such a PCM can bind and block LAG-3 or a LAG-3 ligand (e.g., Galectin-3, fibrinogen-like protein 1 (FGL1), or both). In aspects, PCMs also can modulate PPTs in a pathway that leads to expression or enhanced expression of an inhibitory checkpoint PPT, such as LAG-3 (this approach can be applied to any of the inhibitory checkpoint PPTs described in this disclosure). In AOTI, the EP comprises both a LAG-3 and a PD-1 or PDL-1 CI AARS or PPT. In AOTI, the presence of both types of CIs in the EP significantly enhances the immune response to the EP over either CI alone. In AOTI, the LAG-3 CI AARS or PPT comprises an anti-LAG Ab or anti-LAG Ab sequences. Examples of such Abs are described in WO2010019570; WO2008132601; and WO2004078928. In aspects, PCMs that block LAG-3 induce DOS IRs in DCs. In aspects, PCMs comprise a LAG-3 Ab FP. Eftilagimod alpha (IMP321), an example of such an Ab FP, is known, and has been shown to induce NKC cytokine production, sustain NKC activation, or both. In aspects, blocking the LAG-3 checkpoint pathway with PCM(s) DOS induces T-cell IRs. In aspects, CEPs comprise both LAG-3 blocking PCM(s) and PD-1 pathway blocking PCM(s). In aspects, such CEPs result in DOS reduction of T cell exhaustion in TRs. In aspects, CEPs comprise LAG-3 blocking PCM(s) and TIM-3 blocking PCM(s), B7-H1 blocking PCM(s), or both. In aspects, LAG-3 pathway blocking PCMs comprise PCMs that bind and block 1+ or 2+ LAG-3 ligands, bind and block LAG-3, or both. In aspects, CEPs comprising such PCMs comprise viral Ags, cancer Ags, or both.

### CD200R/CD200AR Pathway Modulating PCMs

[0743] In aspects, CEPs comprise PCM(s) that modulate a CD200R CPCR pathway. In aspects, PCM(s) block a CD200R pathway. In aspects, such PCMs comprise anti-CD200R Abs or Ab FPs, anti-CD200 (OX2) Abs or Ab FPs, or both. Anti-CD200 Abs are known in the art (SFE Mahadevan, D et al. j. immunotherapy cancer 7, 227 (2019). https://doi.org/10.1186/s40425-019-0710-1). In aspects, CEPs comprising such PCM(s) induce IRs comprising DOS enhanced IL-2 expression, enhanced IFNg expression or both. In aspects, delivery of such CEPs induce DOS IRs in T-cells, NK cells, B cells, or combinations. In aspects, such CEPs comprise cancer Ag(s). In aspects, such CEPs induce DOS CEs comprising reduction of tumors, prolonging survival, and increasing survival rates.

[0744] In aspects, CEPs comprise PCM(s) that are CD200AR modulators (CD200AR is an activating CPCR; CD200R is an inhibitory CPCR). In aspects, such PCM(s) activate a CD200AR CPCR. In aspects, such a PCM is a ligand of CD200AR, such as a CD200AR-L. Such ligands are known in the art (SFE Olin M R et al. Cancers (Basel). 2019; 11(2):137. doi:10.3390/cancers11020137 and Xiong Z et al. Clin Cancer Res. 2020; 26(1):232-241. doi:10.1158/1078-0432.CCR-19-2234). In aspects, such a PCM is a multimeric trap.

### Siglec CPCR Pathway Modulating PCMs

[0745] In aspects, PCM(s) modulate Sialic acid-binding Immunoglobulin-like lectins (Siglec) pathway(s). Such CPCRs include Siglec-2, Siglec-3, Siglec-5, Siglec-6, SIglec-7, Siglec-8, Siglec-9, Siglec-10, and Siglec-11.

[0746] In aspects, PCM(s) block Siglec-7 and Siglec-9 CPCR pathway(s). In such aspects, CEPs induce DOS NKC IR(s). In aspects, such CEPs comprise anti-cancer Ags.

[0747] In aspects PCM(s) block Siglec-2 pathway(s) or Siglec-3 pathway(s). In aspects such PCM(s) comprise anti-Siglec Abs/Ab FPs. Such Ab PPTs are known (e.g., Inotuzumab ozogamicin & Gemtuzumab ozogamicin). In aspects, such CEPs comprise CAgs.

### 3) TNF Superfamily Members

[0748] In AOTI, PCM(s) comprise modulators of TNF Superfamily CPCR pathway(s). In aspects, PCM(s) modulate death-domain-containing CPCR pathway(s). In aspects, PCM(s) modulate TNF family decoy receptor CPCR pathway(s). In aspects, PCM(s) modulate TNF receptor-associated factor (TRAF) binding receptor pathway(s). In aspects, PCM(s) comprise TRAF STAP(s) or PPTs that modulate TRAF signaling. In aspects, such PCM(s) are FP(s) comprising T-cell TS(s), CPPS(s), or both.

[0749] In aspects, PCM(s) comprise PPTs of or that modulate 4-1BB/TNFRSF9/CD137, 4-1BB Ligand/TNFSF9, BAFF/BLyS/TNFSF13B, BAFFR/TNFRSF13C, CD27/TNFRSF7, CD27 Ligand/TNFSF7, CD30/TNFRSF8, CD30 Ligand/TNFSF8, OX-40/TNFRSF4, OX40 Ligand/TNFSF4, glucocorticoid-induced TNFR-related protein (GITR, TNFRSF18), GITR Ligand/TNFSF18, CD27, CD40/TNFRSF5, CD40 Ligand/TNFSF5, DR3/TNFRSF25, TLIA/TNFSF15, HVEM/TNFRSF14, LIGHT/TNFSF14, Lymphotoxin-alpha/TNF-beta, RELT/TNFRSF19L, TACI/TNFRSF13B, TL1A/TNFSF15, or TNF RII/TNFRSF1B. BTLA/CD272 is sometimes associated with the TNF CDCR Superfamily and sometimes associated with the B7/CD28 family. TNFa, a cytokine, which can be included in CEPs, is also associated with TNF Superfamily CPCR pathways (e.g., CD27, CD70, CD30, and CD40L). In aspects, such PCM(s) DOS induce IR(s) in T cells, B cells, NK cells, monocytes, DCs, or combinations. In aspects, PCM(s) comprise GITRL PPTs or GITR activators and such PCM(s) DOS induce T cell effector activity or T cell proliferation, promote T cell survival, or suppress TReg activity. In aspects, PCMs comprise a CD70 PPT or an activator of CD27 and such PCMs DOS induce NKC survival or activation, induce T cell memory, or enhance B cell IR(s). In aspects, PCM(s) include CD154 PPTs or activators of CD40 CPCR(s), and such PCMs induce IR(s) in B cells. In aspects, PCM(s) include 4-1BBL PPTs or 4-1BB activators and such PCM(s) DOS induce IRs in NKCs, T-cells, or both (e.g., activation, survival, or effector functions). Examples of such activators (Ab and non-Ab PPTs, including 4-1BBL FVs) are known and can be adapted to expression in CEPESCs (SFE Claus C et al. Sci Transl Med. 2019; 11(496):eaav5989. doi:10.1126/scitranslmed.aav5989; Li Y et al. Cell Rep. 2018; 25(4):909-920.e4. doi:10.1016/j.celrep.2018.09.073; and Vinay D S, Kwon B S. Immunotherapy of cancer with 4-1BB. Mol Cancer Ther. 2012; 11(5):1062-1070. doi:10.1158/1535-7163.MCT-11-0677).

### OX40 Pathway Modulating PCMs

[0750] In aspects, PCM(s) in CEPs modulate an OX40 pathway. In aspects, PCM(s) are OX40 agonists/activators. In aspects, such PCM(s) induce IR(s) comprising CD4 and CD8 T-cell priming, proliferation, and function; reduction of TReg inhibition of CD8 T cells; neutrophil activation or survival; or combinations. In aspects, such PCMs comprise agonist Ab/Ab FPs. Agonist OX40 Abs are known in the art (OX86, see Jin H et al. JCI Insight. 2019; 4(21):e129736. doi:10.1172/jci.insight.129736). In aspects, such PCMs comprise OX40L PPTs (e.g., WT OX40L PPTs, FFs, or FVs). In aspects, such PPTs are OX40 trap PPTs. In aspects, such PCMs DOS induce enhanced immunological memory.

### HVEM/BTLA/LIGHT Pathway Modulating PCMs

[0751] In aspects, PCM(s) modulate HVEM/BTLA/Light pathway(s). In aspects, as discussed elsewhere, gDPs bind HVEM. In such aspects, PCM(s) can or can not also include HVEM/BTLA/LIGHT modulating PCMs. In aspects, such PCM(s) are not included in CEPs. In aspects, CEPs do not comprise HVEM-binding gDPs, but comprise HVEM/BTLA/Light pathway modulating PCM(s). Such PCMs are known in the art (SFE WO2010006071A1). Anti-HVEM Abs are described in, e.g., Heo S K et al. J Leukoc Biol. 2006; 79(2):330-338. doi:10.1189/jlb.1104694. HVEM fragment peptides that block HVEM pathway(s) that can be adapted for use as PCMs are described in Spodzieja M et al. PLoS One. 2017; 12(6):e0179201. doi:10.1371/journal.pone.0179201.

### 4) C Lectin Family Members

[0752] In aspects, PCM(s) modulate C Lectin Family CPCR pathway(s). In aspects, PCM(s) modulate dectin-1 cluster CPCR(s) (e.g., dectin-1, CLEC-1, CLEC-2, LOX-1, CLEC12b, CLEC9a, or combinations). In aspects, PCM(s) modulate dectin-2 cluster CPCR(s) (e.g., dectin-2, blood DC antigen 2 (BDCA-2), DC immunoactivating receptor (DCAR), DC immunoreceptor (DCIR), CTL superfamily 8 (CLECSF8), and MINCLE (CLEC4E)). As also DEH, different species express homologs of such PPTs that are within the scope of such AOTI. In aspects, such PCM(s) induce IRs in ICs, such as ITICs.

### (a) NKG2A and CD94 ITIIs

[0753] In aspects, PCM(s) include modulators of an NKG2A/CD94 pathway. In aspects, PCM(s) inhibit NKG2A or an NKG2A-related pathway. In aspects, such PCM(s) comprise Abs or Ab FPs. Anti-NKG2A/CD94 Abs are known in the art (e.g., IPH2201-Monalizumab—Innate Pharma) and can be adapted for expression in PCM(s) as Abs, Ab fragments, Ab variants, or FPs of any thereof. As with any other PCM described here, in such aspects, additional, heterologous PCM(s) are in CEPs with NKG2A/CD94 modulating PCMs (e.g., PD-1 pathway blocking PCM(s) or anti-CD20 PCMs). In aspects, such CEPs further comprise CAg(s). In such aspects, such CEPs can include CEs including, e.g., enhanced cancer progression-free survival, median overall survival, or both.

### (5) PCM(s) of Other CPCR Pathways

[0754] PCMs are not limited to modulation of any particular pathway and, as noted, the above-described groups and classifications of pathways/CPCRs are debated, in flux, and expanding. Examples of other CPCRs/pathways that can be modulated by PCM(s) and that are not readily classified with the above-described groups include CD7, CD160, CD300a/LMIR1, CD300d, CD3001h, DPPIV/CD26, EphB6, Integrin alpha 4 beta 1, Integrin alpha 4 beta 7/LPAM-1, TSLPR, and inhibitory CPCR adenosine A2a receptor (ADORA2A) (and its ligands TDO or IDO1). In aspects, PCM(s) modulate these/other CPCRs/pathways

### x. Non-Checkpoint Modulating IM Peptides/AARSs (NCMIMPs)

[0755] In aspects, PIMs comprise peptidic IMs that are not typically classified as CMs. CEPs can comprise any suitable number and type of such additional IM PPTs and CCCs and AAWs can include both peptidic and non-peptidic IMs that are not typically classified as CMs. Examples of such non-CM IM PPTs (NCMIMPs), such as cytokines & alarmins, are briefly described here.

### a. Cytokines

[0756] In aspects, CEPs, AACs, or CCCs comprise cytokine(s). E.g., in aspects CEP(s) comprise chemokine(s), interferon(s) (IFN(s)), interleukin(s) (ILs, e.g., IL-2), lymphokine(s), tumor necrosis factor(s) (TNFs), or CT.

[0757] Typically, hormones and most growth factors are not considered cytokines. CEPs can comprise peptidic hormones, growth factors, or both that act as IMs and AACs/CCCs can comprise both peptidic and non-peptidic IM hormones or growth factors or hormones or growth factors that otherwise induce favorable CEs.

[0758] In aspects, cytokine(s) in PCMs are or are related to PPTs primarily expressed in ICs; regulate maturation, growth, and responsiveness of IC populations; are typically upregulated in response to infection, inflammation, trauma, sepsis, or cancer in TRs; typically circulates in larger vertebrates, such as humans, in picomolar concentrations, but in some aspects exhibit an at least 100×, at least 250×, at least 500×, or at least 1000× increase in healthy TRs in response to trauma or infection; is expressed in multiple organs/tissues of a subject, rather than primarily, generally only, or only in a single gland, such as the pancreas; exhibit detectable systemic effects or favor systemic over localized effects in a subject (but some cytokines such as IL-6, IL-8, and IL-12 exhibit relatively localized effects); or CTs (2+, 3+, 4+, or all thereof). These and other characteristics can distinguish cytokines expressed in CEPs from non-cytokine hormones (classical hormones). However, many cytokines, like a classical hormone, can be autocrine or paracrine in nature, and can induce chemotaxis, chemokinesis, endocrine functions, & pyrogenic responses.

[0759] Cytokines are sometimes further classified, e.g., as interleukins (e.g., IL-2, IL-7, and IL-12) and chemokines (e.g., CCL3, CCL26, and CXCL7), based on their presumed function, cell of secretion, or target of action. Cytokines expressed in immune cells are sometimes called lymphokines (e.g., GM-CSF and IFN-γ (IFNg)). Cytokines also or alternatively are sometimes classified as those that induce cellular immune responses (type 1—e.g., TNFa, IFN-γ, etc.), and type 2 (e.g., TGF-β, IL-4, IL-10, IL-13, etc.), which favor antibody responses. Finally, cytokines and immune cells can be classified as level 1 (early), level 2 (intermediate), or level 3 (late), with respect to when the cytokine/immune cells become primarily involved in a typical immune response. Level 1 cytokines include IL-12, IL-23, IL-6 and IL-1β for the type 1 immune responses, and TSLP, IL-25, IL-33 and IL-1α for the type 2 immune responses and can act on type 2 cells (e.g., ILCs, innate-like lymphocytes (ILLs; including NKT cells, MAIT cells and epithelial γδ T cells), TFH cells and TRM cells), which produce type 2 cytokines (e.g., IFN-γ, IL-17, IL-22 for type 1 immune response, and IL-4, IL-5, IL-9, IL-13 and AREG for type 2 immune response) (note that IL-21 is common to both). Level 2 cytokines typically act on level 3 cells, which include effector cells (e.g., macrophages, neutrophils, epithelial cells, eosinophils and basophils, and B cells (e.g., B-2 cells)). Naive T cells can become the source of level 2 cytokines after activation and differentiation into effector or memory cells. ILCs that lack TCRs, ILLs that have invariant TCRs, and TRM cells that have many features in common with ILCs and ILLs, either do not need to undergo proliferation and differentiation steps (ILCs and ILLs), or have already done so in the past (TRM cells). SFE Iwasaki A et al. Nat Immunol. 2015; 16(4):343-353. doi:10.1038/ni.3123. CEPs can comprise any such cytokine(s) or FFs/FVs thereof.

[0760] Cytokine AARSs and PPTS in ES can exhibit one or more immunomodulatory effects in targeted cells or subjects. In AOTI, a cytokine EPs promote proliferation of NK cells, promote activation of NK cells, promote proliferation of CD8 T cells, promote activity of CD8 t cells, promote survival of CD4 T cells, promote survival of CD8 T cells, promote survival of memory T cells, promote proliferation of B cells, promote proliferation of NKT cells, promote differentiation of immune cells, promote maturation of immune cells, inhibit proliferation of TRegs, promote survival of NK cells, promote T cell differentiation, promote monocyte recruitment, promote secretion of other cytokines by immune cells (e.g., IFN-γ), enhance antibody effectiveness (and often bind antibodies), enhance local or systemic inflammation, or result in a detectable or significant combination of any or all thereof in a subject or competent cell-containing composition.

[0761] In AOTI, CEPs comprise ≥1, ≥2, or ≥3 cytokine PPTs. In AOTI, EP comprises 2+ cytokine AARSs or PPTs. In AOTI, one, some, most, generally all, or all of any cytokine AARSs in a CEP are contained in one or more gDAgFPs. In AOTI, EP comprises only one cytokine PPT/AARS. In AOTI, CEPs lack any cytokine PPTs/AARSs.

[0762] Exemplary cytokine PPTs and AARSs that can be included in CEPs include IFNγ, IL-2, IL-4, IL-6, IL-7, IL-10, IL-12, IL14, IL-13, IL-15, IL17, IL-18, IL20, IL21, IL-23, IL-24, IL-27, IL-28a, IL-28b, IL-29, KGF, TNF, TGF, GMCSF, MCSF, OSM, IFNα (e.g., INFα2b), IFNβ, GM-CSF, CD40L, Flt3 ligand, stem cell factor, ancestim, and TNFa (SFE Dranoff, Nat Rev Cancer. 2004 January; 4(1):11-22 and Szlosarek, Novartis Found Symp. 2004; 256:227-37; discussion 237-40, 259-69). Suitable chemokine AARSs and PPTs in EPs can include Glu-Leu-Arg (ELR)-negative chemokines such as IP-10, MCP-3, MIG, and SDF-1 alpha from the human CXC and C-C (or CC) chemokine families, such as MIPalpha, MIPbeta, MCP-1, IL-8, GROalpha, and IP-10. CEPs also or alternatively can comprise AARSs or PPTs that are chemokines, such as RANTES, MIP-1α, Flt-3L (U.S. Pat. Nos. 5,554,512; 5,843,423) and the like. Suitable cytokines also or alternatively include cytokine variants, cytokine fragments, and cytokine fusion proteins of any thereof. Peptidic cytokines and cytokine-related compounds can also or alternatively be included in combination therapy methods, combination prophylaxis methods, and combination compositions, further discussed below. Numerous other cytokines and cytokine-related compounds that can be used in CEPs or as combination product/method agents are described in the various references cited herein. In aspects, cytokine(s) in CEPs or ACCs/CCCs DOS induce NKC functions (such cytokines, e.g., IL2, IL12, IFNg, and IL21, are described in, e.g., Wu Y et al. Front Immunol. 2017; 8:930. doi:10.3389/fimmu.2017.00930.

### b. Alarmins, Stressorins, and Defensin PPTs and Modulators

[0763] In aspects, CEPs comprise alarmin PPT(s), stressorin PPT(s), or both; modulators of alarmin/stressorin pathway(s) (e.g., of a receptor thereof), or combinations. Alarmins and stressorins are compounds that induce physiological effects in TRs including IRs. In general, alarmins/stressorins are similar to cytokines and some cytokines are classified as alarmins (e.g., IL-1α, IL-33, and IL-16). Other peptidic alarmins include high-mobility group box 1 protein (HMGB1), and the Ca2+-binding S100 proteins. In aspects, CEPs comprise 1 or 2 of such PPTs (or FFs or FVs thereof).

[0764] Alarmins can be distinguished from other cytokines by (1) being expressed in response to general stress in TRs vs. specific IC activation, (2) often being activated/modulated and exerting CEs/IRs upon/through post-transcriptional modification/cytoplasmic shuffling as opposed to de novo synthesis, and (3) often acting through inactivation processes or passive release/secretion as opposed to active secretion/processing associated with most cytokines. Other PPTs that are associated with TR inflammation and IRs in an alarmin-like manner and that can be included in CEPs include heat-shock proteins (HSPs) (DEH), adenosine triphosphate (ATP), nucleosomes, and mitochondrial components. As noted, alarmins typically are dual function PPTs, being present in a resting state inside the cell, typically in the nucleus, and being released from cells in response to stress. Alarmins are typically dual function PPTs and expressed in somatic cells. Alarmins are often released in response to cellular necrosis. Stressorins, which are either alarmins or a subclass of alarmins, also are expressed by somatic cells, but are more likely to be actively secreted in innate immune cell responses in a manner similar to alarmins. The characteristics of alarmins and stressorins are described in, e.g., Rider P. et al. J Immunol Feb. 15, 2017, 198 (4) 1395-1402; DOI: https://doi.org/10.4049/jimmunol.1601342. In aspects, CEPs comprise alarmin PPTs, stressorin PPTs, or both. CEP(s) can comprise any number of stressorin/alarmin PPT(s) including any suitable number of alarmin or stressorin AARS(s), which can be WT AARS(s) of complete alarmin/stressorin PPTs, FFs, or FVs thereof, or modulators of alarmin-related pathways that induce IR(s). Examples of alarmins and principles adaptable to this AOTI are described in Matta B M et al. Am J Transplant. 2017; 17(2):320-327. doi:10.1111/ajt.13887; Yang D et al. Immunol Rev. 2017; 280(1):41-56. doi:10.1111/imr.12577; and Bertheloot D, et al. Cell Mol Immunol. 2017; 14(1):43-64. doi:10.1038/cmi.2016.34.

[0765] In aspects, PIMs include a modulator of an alarmin receptor/PPT. Examples of such PPTs include DEC-205, TLR5, and HSP70. In AOTI, such PPTs or modulators thereof are expressed in CEPs as PIMs and induce IR(s) in TR(s).

[0766] In aspects, CEPs include defensin(s). Defensin(s) are effectors of the innate immune system with potent antibacterial, antiviral, or antifungal activity. Defensins have direct anti-pathogen DCA activity and some defensins exhibit potent immunomodulatory activity that can alter innate and adaptive IR(s), which naturally occurs in response to pathogen infection. Defensins are typically cysteine-rich cationic proteins that are smaller than cytokines. In aspects, CEPs comprise defensin(s) with direct anti-DCA activity, IC signaling, or both. Defensin PIMs can comprise a defensin PPTs (WT, FF, or FV), β defensins (WT, FF, or FV), or both. In aspects, CEPs comprise β defensin PPTs/AARs and such CEPs DOS induce DC migration. In aspects, ≥1 defensin AARs are expressed as FPs in CEPs (e.g., gDAgFP(s) in CEPs can comprise defensin AARS(s)). Defensins are KITA, SFE Yang D et al. Science. 1999 Oct. 15; 286(5439):525-8; Holly M K et al. Annu Rev Virol. 2017; 4(1):369-391. doi:10.1146/annurev-virology-101416-041734; Zhao L et al. Curr Opin Hematol. 2014; 21(1):37-42. doi:10.1097/MOH.0000000000000005; Ganz T. Nat Rev Immunol. 2003; 3(9):710-720. doi:10.1038/nri1180; CN105031613; CN103614381; & U.S. Pat. No. 6,545,140. Any defensins described therein can be ATAOTI.

### c. PIM Adjuvants

[0767] Another type of PIM that can be included in CEPs are PPTs/AARSs that can be characterized as adjuvants for the Ag(s) of the CEP. The term “adjuvant” in this respect is a catch-all for PIMs that induce non-specific immune responses and that either do not fit into other categories of PIMs or are classified in several categories (e.g., HSPs). Knowledgeable persons will recognize that, e.g., cytokines, CMs, alarmins, and the like also induce non-specific immune responses. As such, there can be overlap between these three “classes” of PIMs. Examples of PIMs that can be considered CEP adjuvants include TLRs, RIG-1, and NOD-like receptors and modulators thereof. CEPs can comprise any suitable number of PIM adjuvant (PIMA) PPT(s), AARS(s), or both. Such PIM adjuvant(s) induce DOS enhancement of antigen-specific IR(s) in TR(s). Other examples of PIM adjuvants that can be incorporated in CEPs include muramyl dipeptide, aminoalkyl glucosaminide 4-phosphates, such as RC529, and bacterial toxoids or toxin fragments. Other PIMs that can be in CEPs as AARSs or PPTs include cathelicidin and eosinophil-derived neurotoxin.

[0768] As is the case with cytokines and other compounds described herein, combination methods and combination compositions also or alternatively can include PIM adjuvants and other types of adjuvants, including lipid, glycan (e.g., beta glucan), or glycolipid (e.g., LPS) IMs/adjuvants, mineral preparations (e.g., alum), and other adjuvants. Additionally, as noted above, nucleotide sequences of constructs can provide immunogenic adjuvant properties, as in the case of CpG sequences. CCC/AAC adjuvants are also DEH.

[0769] HSPs can be classified as PIMAs or with other types of PIMs (e.g., alarmin-associated PPTs). Heat shock proteins (HSPs). In aspects, HSP AAARs are components of Ag FPs (e.g., CAg FPs). In aspects, PIMs comprise a HSP gp96/Ag(s) FP. An example of such a composition is HSP-protein complex 96 (HSPPC-96; vitespen). In aspects, a PIM comprises HSP65 PPTs/AARSs. In aspects, such AARSs are in Ag FPs. In aspects, such FPs comprise anti-pathogen or anti-cancer Ag(s), such as a HPV16 E7 Ag. PIMs can include chaperone proteins, such as gp96 (HSP90B1), which chaperones peptides generated by intracellular proteasome degradation into class I MHC; and (ii) can function as a danger-associated molecular pattern & activate DCs by binding to TLR-2 & TLR-4. Vabulas R M et al. J Biol Chem 2002; 277:20847-53.

[0770] In aspects, PIMs comprise an Fc receptor PPTs/AARSs, which can both be characterized as a component of an Ab FP or a PIM. In aspects, FPs comprising an Fc receptor AARS DOS induce ADCC in TRs.

[0771] In aspects, PIMs comprise PRRs or PRR modulators, e.g., Toll-like receptors (TLRs), nucleotide-binding oligomerization domain (NOD)-like receptors (NLRs) and RIG-I-like receptors (RLRs) and peptidic modulators thereof. In aspects, PIMs comprise flagellin PPTs/AARs.

[0772] PIMs can also comprise MHC molecules, fusion proteins comprising MHC molecules/sequences, or molecules that bind to MHC molecules. MHC II binding peptides are described in WO2012027365, WO2011031298, US20120070493,and US20110110965.

[0773] In AOTI, PIMs can be PPTs that modulate complement activity, such as blocking a completement inhibitor, such as CD46 or CD55 or an agonist for a completement receptor, such as CD21, a ficolin, or a related receptor modulator such as a modulator of CD19 or CD22. In AOTI, a PIM of an CEP comprises a pathogen-associated molecular pattern (PAMP)-related IM, such as a PAMP mimetic that is a PIM (e.g., a mimotope), a PRR modulator (e.g., a PRR agonist), or both. In aspects, a PIM comprises an AARS or PPT that is an opsonin or other macrophage function modulator such as CRP, SAA, or SAP, a collectin (e.g., surfactant protein-A), or a mannose-binding lectin (MBL) or Lipopolysaccharide-binding protein (LBP). In aspects, a PIM comprises a scavenger receptor related IM, such as an IM of CD36 or CD68. In aspects, a PIM of an EP is an alarmin PPT or comprises an alarmin AARS. In aspects, a PIM of an EP is a RAGE-associated IM (e.g., a HMGB-1 AARS/PPT or a different DAMP), which also can be characterized as an ITII.

[0774] Adjuvant AARSs/PPTs also can comprise chaperone(s), e.g., cytoplasmic chaperone PPT(s)/AARS(s), ER chaperone PPTs/AARSs, viral intercellular spreading protein(s), cytoplasmic translocation polypeptide domain of a pathogenic toxin, centrosome targeting AARS(s), lysosome-associated membrane protein type 1 or associated PPTs, or FFs or FVS thereof. PIM adjuvant(s) can comprise calreticulin (CRT), N-CRT, P-CRT, C-CRT, γ-tubulin, Sig/LAMP-1, VP22 or a functional homolog, FF, or FV of any thereof. As indicated here, any of the PIM adjuvants described herein can be incorporated into FPs with other aspects of CEPs or can be expressed as NFP EPs.

[0775] As DEH, CEPs can comprise modulators of PPT pathway(s), such as ubiquitin pathway(s). E.g., CEPs can comprise ubiquitin ligase PPTs/AARs (e.g., E3 ubiquitin ligase PPTs/AARSs), or a ubiquitin-conjugating enzyme (e.g., E2)

### d. Non-CPCR ICRMs and ICRLMs

[0776] In aspects, CEPs comprise modulators of ICRs, ICRLs, or both that are not characterized as CPCRs, but that induce DOS IRs. Examples of such ICRs and ICRLs are also encompassed by other classes described herein, thus there can be overlap in this category with other categories. Examples of such ICRs include, e.g., Toll-like receptor (TLR) (e.g., TLR1, TLR2, TLR4, TLR5 or TLR6 or TLR3, TLR7, TLR8 and TLR9) and examples of such ICRLMs include peptidic modulators thereof. An example of such ICRLMs are LPS mimotopes that interact with TLR-4 and induce IR(s) (SFE Shanmugam A et al. PLoS One. 2012; 7(2):e30839. doi:10.1371/journal.pone.0030839). Inclusion of mimotopes that modulate TLRs and other ICRs in CEPs is an AOTI. CEPs can comprise modulators or PPTs of leucine-rich repeat-containing receptors (NLRs), NOD-Like receptors, RIG-I-like receptors (RLRs), or AIM-2 like receptors. In aspects, such PPTS are Abs or Ab FPs. In aspects, such Ab/Ab FPs are multi-specific (e.g., are TRiKE or BiKE PPTs). These and other PIMs can include, e.g., cytokine receptor modulators and modulators of other ICRs that lead to DOS induction of IR(s).

### e. Immunosuppressive IMs

[0777] In aspects, CEPs comprise immunosuppressive PIMs. In aspects, CEPESCs AAW immunosuppressive AACs. In aspects, CEPs do not comprise any immunosuppressive PIMs. In aspects, CEPESCs are not AAW immunosuppressive AACs. Immunosuppressors comprise compositions that reduce, inhibit, delay, diminish, or otherwise suppress (“suppress”) IR(s). Typically, in aspects where CEPs comprise immunosuppressive PIM(s), CEPESCs are in CCs with immunosuppressor(s), or CEPESCs are AAWs immunosuppressor(s), the immunosuppressor(s) suppresses only certain IRs and does not DOS inhibit OSMOA IRs, does not DOS inhibit OSMOA CEs, or both. E.g., an immunosuppressor may inhibit IRs associated with cytokine overproduction (e.g., TH2 cytokine overproduction), so as to avoid cytokine storm (cytokine release syndrome) issues, while not inhibiting TH1 responses.

### xi. Other IR-Enhancing Expression Products (IREEPs)

[0778] In aspects, CEPs comprise EPs that are not categorized into any of the above-described aspects but that are AW induction/enhancement of IR(s) in TR(s) or that can be characterized into other useful categories of PPTs. Examples of such EPs are discussed here.

[0779] E.g., in aspects CEPs comprise activating PI3K(s), such as the p1106 isoform (p1106-PI3K), Class I PI3K. In aspects, CEPs comprise mammalian target of rapamycin (mTOR) PPTs. In aspects, CEPs comprise AKT PPTs. In aspects, CEP(s) comprise inhibitors of PTEN, SHIP, or both. In aspects, CEP(s) comprise VAV PPTs, e.g., Vav1, Vav2, or Vav 3 PPTs.

[0780] In aspects, CEP(s) comprise PPTs that block/inhibits Bruton's tyrosine kinase (BTK); growth arrest specific 6 (Gas6); receptor-interacting serine/threonine kinase 1 (RIPK1); an inhibitory DAG kinase (DGK) such as DGK; or Janus kinase 2/signal transducer and activator of transcription 3 (Jak2/Stat3). In aspects, CEP(s) comprise TLR agonists (in aspects, such CEP(s) also comprise PD-1 PCI(s), e.g., anti-PD-L1 trap proteins or Abs).

[0781] In aspects, CEP(s) comprise FP(s) with NGD NKC ICR-binding domain(s). Examples of NKC IRs are DEH.

[0782] In aspects, CEPs comprise DAMPs, such as, e.g., calreticulin, HSPs (e.g., HSP70 or HSP90 PPTs), secreted amphoterin (HMGB 1), or ATP PPTs. In aspects, CEP(s) comprise hsc70, hsp110, grp170, or gp96 PPTs. In aspects, such PPTs are FPs. E.g., in aspects, a calreticulin (CRT) AARS acts as a TS in FPs in CEPs. As DEH, other PPTs discussed here can also be characterized as adjuvants & expressed in CEPs as part of FPs or as NFP PPTs (e.g., HSPs).

[0783] In aspects, CEPs comprise innate IC IMs, e.g., anti-CSF1 PPTs, which can DOS promote development of M1 macrophages (e.g., anti-cancer macrophages). mAbs targeting CSF1R have also been generated (FPA008, Five Prime Therapeutics; emactuzumab, Hoffmann-La Roche).

### a. Innate Trained Immunity Immunomoduators (ITIIMs)

[0784] In aspects, CEP(s) comprise EP(s) that can be classified as innate trained immunity immunomodulator(s) (ITIIM(s)), either solely or in addition to other classes of EP(s) DEH (e.g., PCMs, ITICSTAPs, etc.). ITIIMs are immunomodulator(s) that exhibit significant induction of IR(s) in or through ITICs. In aspects, ITIIMs exhibit IR(s) in ITICs that are at least as great as IR(s) induced by the EP(s) in other ICs. In aspects, ITIIMs are limited to those EPs that predominantly, generally, substantially or only exhibit significant IR(s) in or through ITICs. Several EPs described herein are ITIIs (e.g., EAT-2 PPTs and SAP PPTs). In aspects, ITIIM(s) are FP(s) comprising a TS that direct(s) the FP to ITICs. In aspects, the FP directs the FP to DCs. In aspects, the TS binds DCs, other ICs, and non-ICs (in aspects, such an FP is a N1-binding gDFP). In aspects, the TS is more specific for DCs than other cells, other ICs, or both (e.g., the FP comprises a DEC-205-binding domain). In aspects, PIM portions of such FP(s) comprise PPTs that block ITIC (e.g., DC) associated IL-10 expression/secretion, block DC-associated IL-10R activity, block TGF-R binding/activity in ITICs/DCs, block IDO activity in DCs, block CCL22, block CCL17, block Bax apoptosis induction, block Bak apoptosis induction, comprise IL-12 PPTs, comprise MHCII PPTs, or combinations thereof.

[0785] In aspects, CEP(s) comprise chemokine(s) or related PPTs. Examples of such PPTs include macrophage inflammatory protein-1a (MIP-1a) and MIP-1b. In aspects, CEPs comprise IC-associated integrin PPTs or ligands, e.g., integrin-a4b1 PPTs or VCAM-1 PPTs. Other ITIIMs include TLR ligands/modulators such as TLR mimotopes.

### B. Exemplary Expression Products

[0786] To better illustrate aspects of the invention, specific EPs will be described in this section, including exemplary gD domains, ITIIs, CIs, and Ags.

### 1. Antigenic PPTs and AARSs

[0787] CEPESCs and methods OTI can be applied to induce IRs against a variety of DCAs. In AOTI, the DCA is a pathogen, e.g., a virus. In aspects, a DCA is a cancer. The specificity of IR(s) associated with EP(s) will be primarily determined by the one or more Ags expressed or included in the EP, though the duration, level, and nature of the immune response will also be impacted by other elements of the EP, such as any associated targeting sequences and the inclusion of any CI AARSs or PPTs, ITII AARSs or PPTs, or both.

### i. Pathogen Ags and Epitopes

[0788] In AOTI, the EP capable of eliciting an immune response against a pathogenic disease-causing agent (DCA). An EP can comprise any suitable number and type of pathogen Ags. In AOTI, some, most, generally all, or all of the Ags of an EP are directed to one type of pathogen. In aspects, some, most, generally all, or all of the Ags of an EP are from a pathogen that infects a target species. In AOTI, an EP comprises at least two pathogen Ags, such as at least one MHC I and at least one MHC II Ags against the same type of pathogen. In AOTI, some, most, or all of the Ags of an EP are contained in one or more fusion proteins, at least some, most, or all of which are gDAgFPs.

[0789] As discussed elsewhere, AgESs can comprise one or more modifications for improved expression (e.g., codon optimization or RNA optimization). An Ag also or alternatively comprise a fusion partner, such as an immunoglobulin leader sequence to increase the immunogenicity of the Ag FP or a cytokine. An Ag can also or alternatively be a synthetic Ag developed from a consensus sequence of several related DCA Ags.

[0790] Examples of Ags that can be encoded by AgESs in EPs include influenza Ags, such as nucleoprotein P, matrixprotein (M), and hemagglutinin (HA) Ags; Plasmodium Ags, such as thrombospondin-related anonymous protein, ring-infected erythrocyte surface antigen (RESA), merozoite surface protein 1 (MSP1), merozoite surface protein 2 (MSP2), merozoite surface protein 3 (MSP3), and glutamate-rich antigen (GLURP); and human papilloma virus (HPV) antigens, e.g., HPV-16 antigens, such as E5 protein, E6 protein, and E7 protein; and HIV antigens, such as gag, pol, nef, tet, and env.

[0791] In aspects, the DCA is one of the following pathogens: leishmania, Entamoeba histolytica (which causes amebiasis), trichuris, BCG/Tuberculosis, Malaria, Plasmodium falciparum, Plasmodium malariae, Plasmodium vivax, Rotavirus, Cholera, Diptheria-Tetanus, Pertussis, Haemophilus influenzae, Hepatitis B, Human papilloma virus, Influenza seasonal), Influenza A (H1N1) Pandemic, Measles and Rubella, Mumps, Meningococcus A+C, Oral Polio Vaccines, mono, bi and trivalent, Pneumococcal, Rabies, Tetanus Toxoid, Yellow Fever, Bacillus anthracis (anthrax), Clostridium botulinum toxin (botulism), Yersinia pestis (plague), Variola major (smallpox) and other related pox viruses, Francisella tularensis (tularemia), Viral hemorrhagic fevers, Arenaviruses (LCM, Junin virus, Machupo virus, Guanarito virus, Lassa Fever), Bunyaviruses (Hantaviruses, Rift Valley Fever), Flaviruses (Dengue), Filoviruses (Ebola, Marburg), Burkholderia pseudomallei, Coxiella burnetii (Q fever), Brucella species (brucellosis), Burkholderia mallei (glanders), Chlamydia psittaci (Psittacosis), Ricin toxin (from Ricinus communis), Epsilon toxin of Clostridium perfringens, Staphylococcus enterotoxin B, Typhus fever (Rickettsia prowazekii), other Rickettsias, Food- and Waterborne Pathogens, Bacteria (Diarrheagenic E. coli, Pathogenic Vibrios, Shigella species, Salmonella BCG/, Campylobacter jejuni, Yersinia enterocolitica), Viruses (Caliciviruses, Hepatitis A, West Nile Virus, LaCrosse, Calif. encephalitis, VEE, EEE, WEE, Japanese Encephalitis Virus, Kyasanur Forest Virus, Nipah virus, hantaviruses, Tickborne hemorrhagic fever viruses, Chikungunya virus, Crimean-Congo Hemorrhagic fever virus, Tickborne encephalitis viruses, Hepatitis B virus, Hepatitis C virus, Herpes Simplex virus (HSV), Human immunodeficiency virus (HIV), Human papillomavirus (HPV)), Protozoa (Cryptosporidium parvum, Cyclospora cayatanensis, Giardia lamblia, Entamoeba histolytica, Toxoplasma), Fungi (Microsporidia), Yellow fever, Tuberculosis, including drug-resistant TB, Rabies, Prions, Severe acute respiratory syndrome associated coronavirus (SARS-CoV), Coccidioides posadasii, Coccidioides immitis, Bacterial vaginosis, Chlamydia trachomatis, Cytomegalovirus, Granuloma inguinale, Hemophilus ducreyi, Neisseria gonorrhea, Treponema pallidum, Streptococcus mutans, and Trichomonas vaginalis. DCAs from which pathogen Ags can be obtained for inclusion in EPs include, without limitation, influenza virus, HIV, cytomegalovirus, dengue virus, yellow fever virus, tick-borne encephalitis virus, hepatitis virus, japanese encephalitis virus, human papillomavirus, coxsackievirus, herpes simplex virus, rubella virus, mumps virus, measles virus, rabies virus, polio virus, rotavirus, respiratory syncytial virus, Ebola virus, Chikungunya virus, Mycobacterium tuberculosis, Staphylococcus aureus, Staphylococcus epidermidis, E. coli, Clostridium difficile, Bordetella pertussis, Clostridium tetani, Haemophilus influenzae type b, Chlamydia pneumoniae, Chlamydia trachomatis, Porphyromonas gingivalis, Pseudomonas aeruginosa, Mycobacterium diphtheriae, Shigella, Neisseria meningitidis, Streptococcus pneumoniae and Plasmodium falciparum.

[0792] Disorders that can be targeted by compositions and methods of the invention can include Legionnaires' disease (Legionella), gastric ulcer (Helicobacter), cholera (Vibrio), E. coli infections, staphylococcal infections, salmonella infections or streptococcal infections, tetanus (Clostridium tetani), protozoan infectious diseases (malaria, sleeping sickness, leishmaniasis, toxoplasmosis, i.e. infections caused by plasmodium, trypanosomes, leishmania and toxoplasma), diphtheria, leprosy, typhoids, pertussis, rabies, tetanus, tuberculosis, typhoid, varicella, diarrheal infections such as Amoebiasis, Clostridium difficile-associated diarrhea (CDAD), Cryptosporidiosis, Giardiasis, Cyclosporiasis and Rotaviral gastroenteritis, encephalitis such as Japanese encephalitis, Wester equine encephalitis and Tick-borne encephalitis (TBE), fungal skin diseases such as candidiasis, onychomycosis, Tinea captis/scal ringworm, Tinea corporis/body ringworm, Tinea cruris/jock itch, sporotrichosis and Tinea pedis/Athlete's foot, Meningitis such as Haemophilus influenza type b (Hib), Meningitis, viral, meningococcal infections and pneumococcal infection, neglected tropical diseases such as Argentine haemorrhagic fever, Leishmaniasis, Nematode/roundworm infections, Ross river virus infection and West Nile virus (WNV) disease, Non-HIV STDs such as Trichomoniasis, Human papillomavirus (HPV) infections, sexually transmitted chlamydial diseases, Chancroid and Syphilis, Non-septic bacterial infections such as cellulitis, lyme disease, tetanus, tuberculosis, MRSA infection, pseudomonas, staphylococcal infections, Boutonneuse fever, Leptospirosis, Rheumatic fever, Botulism, Rickettsial disease and Mastoiditis, parasitic infections such as Cysticercosis, Echinococcosis, Trematode/Fluke infections, Trichinellosis, Babesiosis, Hypodermyiasis, Diphyllobothriasis and Trypanosomiasisplague, Anthrax Nipah virus disease, Hanta virus, Smallpox, Glanders (Burkholderia mallei), Melioidosis (Burkholderia pseudomallei), Psittacosis (Chlamydia psittaci), Q fever (Coxiella burnetii), Tularemia (Fancisella tularensis), rubella, mumps and polio. Coccidioidomycosis and swine (H1N1) influenza, sepsis such as bacteraemia, sepsis/septic shock, sepsis in premature infants, urinary tract infection such as vaginal infections (bacterial), vaginal infections (fungal) and gonococcal infection, foodborn illnesses such as brucellosis (Brucella species), Clostridium perfringens (Epsilon toxin), E. Coli O157:H7 (Escherichia coli), Salmonellosis (Salmonella species), Shingellosis (Shingella), Vibriosis and Listeriosis, rabies, pneumonia, pneumonic plague, acute febrile pharyngitis, pharyngoconjunctival fever, epidemic keratoconjunctivitis, infantile gastroenteritis, Coxsackie infections, infectious mononucleosis, Burkitt lymphoma, acute hepatitis, chronic hepatitis, hepatic cirrhosis, hepatocellular carcinoma, primary HSV-1 infection (e.g., gingivostomatitis in children, tonsillitis and pharyngitis in adults, keratoconjunctivitis), latent HSV-1 infection (e.g., herpes labialis and cold sores), primary HSV-2 infection, latent HSV-2 infection, aseptic meningitis, infectious mononucleosis, Cytomegalic inclusion disease, Kaposi sarcoma, multicentric Castleman disease, primary effusion lymphoma, AIDS, influenza, Reye syndrome, measles, postinfectious encephalomyelitis, Mumps, hyperplastic epithelial lesions (e.g., common, flat, plantar and anogenital warts, laryngeal papillomas, epidermodysplasia verruciformis), cervical carcinoma, squamous cell carcinomas, croup, pneumonia, bronchiolitis, common cold, Poliomyelitis, Rabies, bronchiolitis, pneumonia, influenza-like syndrome, severe bronchiolitis with pneumonia, German measles, congenital rubella, Varicella, and herpes zoster. As such, EPs can comprise 1+ Ags against any of the DCAs that cause such disorders.

### a. Viral Ags & Epitopes

[0793] In AOTI, the DCA is a virus and the EP comprises one or more viral Ags. Examples of viral Ags that can be included in EPs include herpes virus Ag proteins, such as gH, gL gM gB gC gK gE or gD proteins or Ag fragments or herpesvirus Immediate Early (IE) proteins such as HSV-1 or HSV-2 ICP27, ICP 47, IC P 4, or ICP36 from HSV1 or HSV2; cytomegalovirus proteins (such as CMV gB or derivatives thereof); Epstein Barr virus proteins (such as EBV gp350 or derivatives thereof); Varicella Zoster Virus proteins (such as gpI, II, III and IE63), or from a hepatitis virus such as hepatitis B virus (for example Hepatitis B Surface antigen (HBSAg) or Hepatitis core antigen or pol), hepatitis C virus antigen and hepatitis E virus antigen, or Ags of other pathogenic viruses, such as paramyxoviruses: Respiratory Syncytial virus (such as F and G proteins or derivatives thereof), or antigens from parainfluenza virus, measles virus, mumps virus, human papilloma viruses (for example HPVG, 11, 16, 18, eg L1, L2, E1, E2, E3, E4, E5, E6, or E7), flaviviruses (e.g. Yellow Fever Virus, Dengue Virus, Tick-borne encephalitis virus, Japanese Encephalitis Virus) or Influenza virus Ags (such as HA, NP, NA, or M proteins, or CT), or HIV Ags (such as tat, nef, gpl20 or gpl60, gp40, p24, gag, env, vif, vpr, vpu, or rev).

[0794] Viral Ag(s) can comprise 1+ Ags of a virus selected from Adenoviridae, Arenaviridae, Bunyaviridae, Caliciviridae, Coronaviridae, Filoviridae, Hepadnaviridae, Herpesviridae, Orthomyxoviridae, Papovaviridae, Paramyxoviridae, Parvoviridae, Picornaviridae, Poxviridae, Reoviridae, Retroviridae, Rhabdoviridae, or Togaviridae. Viral Ag(s) can be from papilloma viruses e.g., human papillomoa virus (HPV), human immunodeficiency virus (HIV), polio virus, hepatitis B virus, hepatitis C virus, smallpox virus (Variola major & minor), vaccinia virus, influenza virus, rhinoviruses, dengue fever virus, equine encephalitis viruses, rubella virus, yellow fever virus, Norwalk virus, hepatitis A virus, human T-cell leukemia virus (HTLV-I), hairy cell leukemia virus (HTLV-II), California encephalitis virus, Hanta virus (hemorrhagic fever), rabies virus, Ebola fever virus, Marburg virus, measles virus, mumps virus, respiratory syncytial virus (RSV), HSV-1, herpes simplex 2 (genital herpes), herpes zoster (varicella-zoster, a.k.a., chickenpox), cytomegalovirus (CMV), for example human CMV, Epstein-Barr virus (EBV), flavivirus, foot and mouth disease virus, chikungunya virus, lassa virus, arenavirus, lymphocytic choriomeningitis virus (LCMV), or cancer causing virus.

[0795] In aspects, an Ag is from a strain of virus selected from the group consisting of adenovirus strains; Herpes simplex, type 1; Herpes simplex, type 2; encephalitis virus, papillomavirus, Varicella-zoster virus; Epstein-barr virus; Human cytomegalovirus; Human herpes virus, type 8; Human papillomavirus; BK virus; JC virus; Smallpox; polio virus; Hepatitis B virus; Human bocavirus; Parvovirus B19; Human astrovirus; Norwalk virus; coxsackievirus; hepatitis A virus; poliovirus; rhinovirus; Severe acute respiratory syndrome virus; Hepatitis C virus; Yellow Fever virus; Dengue virus; West Nile virus; Rubella virus; Hepatitis E virus; Human Immunodeficiency virus (HIV); Influenza virus; Guanarito virus; Junin virus; Lassa virus; Machupo virus; Sabie virus; Crimean-Congo hemorrhagic fever virus; Ebola virus; Marburg virus; Measles virus; Mumps virus; Parainfluenza virus; Respiratory syncytial virus; Human metapneumovirus; Hendra virus; Nipah virus; Rabies virus; Hepatitis D; Rotavirus; Orbivirus; Coltivirus; Banna virus; Human Enterovirus; Hanta virus; West Nile virus; Middle East Respiratory Syndrome Corona Virus; Japanese encephalitis virus; Vesicular exanthernavirus; and Eastern equine encephalitis. In aspects, an EP comprises one or more Ags of encephalitis virus, Varicella-zoster virus; Human herpesvirus, type 8; BK virus; JC virus; Smallpox; polio virus, Human bocavirus; Parvovirus B19; Human astrovirus; Norwalk virus; coxsackievirus; poliovirus; rhinovirus; Severe acute respiratory syndrome virus; yellow fever virus; dengue virus; West Nile virus; Rubella virus; Hepatitis E virus; Guanarito virus; Junin virus; Lassa virus; Machupo virus; Sabievirus; Crimean-Congo hemorrhagic fever virus; Ebola virus; Marburg virus; Measles virus; Mumps virus; Parainfluenza virus; Respiratory syncytial virus; Human metapneumovirus; Hendra virus; Nipah virus; Rabies virus; Hepatitis D; Rotavirus; Orbivirus; Coltivirus; Hantavirus, Middle East Respiratory Coronavirus; Chikungunya virus, or Banna virus.

[0796] The virus can be a virus that is associated with any type of TR (e.g., dogs, pigs, or humans). Skilled readers understand that many viruses can infect different species. As such a virus identified as associated with a species (e.g., human influenza virus) means a virus that typically is predominately found or commonly associated with such species. Such identifications are used in the art to assist in the classification of viruses, but it will be understood that some viruses can infect multiple species or transmit/“jump” from a species to another species (as in the well-known case of avian flu being transmitted to humans). One aspect of the invention is the prevention of species-to-species transmission of viruses by therapeutic or preventive administration of viral Ag CEPESCs. For example, in one aspect the invention provides a method of reducing the likelihood or frequency of non-human species to human species transmission of virus comprising administration of CEPESCs to non-human TR(s), such as companion animals (e.g., dogs or cats), livestock, or both.

[0797] An EP can comprise a hepatitis antigen. A hepatitis antigen of an EP can be an antigen or immunogen from hepatitis A virus (HAV), hepatitis B virus (HBV), hepatitis C virus (HCV), hepatitis D virus (HDV), and/or hepatitis E virus (HEV). In some embodiments, the hepatitis antigen can be a heterologous nucleic acid molecule(s), such as a plasmid(s), which encodes one or more of the antigens from HAV, HBV, HCV, HDV, and HEV. The hepatitis antigen can be full-length or immunogenic fragments of full-length proteins. An HAV Ag can comprise a capsid protein, a HAV non-structural protein, a fragment thereof, a variant thereof, or a combination thereof. A HCV Ag can comprise a nucleocapsid protein (i.e., core protein), a HCV envelope protein (e.g., E1 and E2), a HCV non-structural protein (e.g., NS1, NS2, NS3, NS4a, NS4b, NS5a, and NS5b), a fragment thereof, a variant thereof, or a combination thereof. An HVD antigen can be a HDV delta antigen, fragment thereof, or variant thereof. A HEV Ag can be a HEV capsid protein, fragment thereof, or variant thereof. An HBV Ag can be a HBV core protein, a HBV surface protein, a HBV DNA polymerase, a HBV protein encoded by gene X, fragment thereof, variant thereof, or CT. An HBV Ag can be from any HBV genotype (e.g., A-H).

[0798] An HPV antigen can be any suitable HPV Ag. HPV Ags can be from, e.g., HPV types 16, 18, 31, 33, 35, 45, 52, and 58 which cause cervical cancer, rectal cancer, and/or other cancers. The HPV antigen can be from HPV types 6 and 11, which cause genital warts, and are known to be causes of head and neck cancer. HPV antigens can be the HPV E6 or E7 domains from each HPV type. For example, for HPV type 16 (HPV16), the HPV16 antigen can include the HPV16 E6 antigen, the HPV16 E7 antigen, fragments, variants, or combinations thereof. Similarly, the HPV antigen can be HPV 6 E6 and/or E7, HPV 11 E6 and/or E7, HPV 18 E6 and/or E7, HPV 31 E6 and/or E7, HPV 33 E6 and/or E7, HPV 52 E6 and/or E7, or HPV 58 E6 and/or E7, fragments, variants, or combinations thereof. In one embodiment an HPV antigen such as an E6 or E7 antigen disclosed herein is selected from an HPV 6 strain, and HPV 11 strain, HPV 16 strain, an HPV-18 strain, an HPV-31 strain, an HPV-35 strain, an HPV-39 strain, an HPV-45 strain, an HPV-51 strain an HPV-52 strain, an HPV-58 strain or an HPV-59 strain. In another embodiment, the HPV antigen is selected from a high-risk HPV strain. In another embodiment, the HPV strain is a mucosal HPV type. In another embodiment, HPV antigens can be selected from all HPV strains, including non-oncogenic HPVs such as type 6, 11, etc. that cause warts and dysplasias. In another embodiment, the HPV antigen is an HPV-31. In another embodiment, the HPV is an HPV-35. In another embodiment, the HPV is an HPV-39. In another embodiment, the HPV is an HPV-45. In another embodiment, the HPV is an HPV-51. In another embodiment, the HPV is an HPV-52. In another embodiment, the HPV is an HPV-58. In another embodiment, the HPV is a high-risk HPV type. In another embodiment, the HPV is a mucosal HPV type. In another embodiment, an HPV E6 antigen is utilized instead of or in addition to an E7 antigen in a composition or method disclosed herein for treating or ameliorating an HPV-mediated disease, disorder, or symptom.

[0799] An RSV antigen can be a human RSV fusion protein (also referred to herein as “RSV F”, “RSV F protein” and “F protein”), or fragment or variant thereof. The human RSV fusion protein can be conserved between RSV subtypes A and B. The RSV antigen can be a RSV F protein, or fragment or variant thereof, from the RSV Long strain (GenBank AAX23994.1). The RSV antigen can be a RSV F protein from the RSV A2 strain (GenBank AAB59858.1), or a fragment or variant thereof. The RSV antigen can be a monomer, a dimer or trimer of the RSV F protein, or a fragment or variant thereof. The RSV antigen can be an optimized amino acid RSV F amino acid sequence, or fragment or variant thereof. An RSV antigen can also be human RSV attachment glycoprotein (also referred to herein as “RSV G”, “RSV G protein” and “G protein”), or fragment or variant thereof. The human RSV G protein differs between RSV subtypes A and B. The antigen can be RSV G protein, or fragment or variant thereof, from the RSV Long strain (GenBank AAX23993). The RSV antigen can be RSV G protein from: the RSV subtype B isolate H5601, the RSV subtype B isolate H1068, the RSV subtype B isolate H5598, the RSV subtype B isolate H1123, or a fragment or variant thereof. The RSV antigen can be an optimized amino acid RSV G amino acid sequence, or fragment or variant thereof. An RSV antigen can be human RSV non-structural protein 1 (“NS1 protein”), or fragment or variant thereof. For example, the RSV antigen can be RSV NS1 protein, or fragment or variant thereof, from the RSV Long strain (GenBank AAX23987.1). The RSV antigen human can also be RSV non-structural protein 2 (“NS2 protein”), or fragment or variant thereof. For example, the RSV antigen can be RSV NS2 protein, or fragment or variant thereof, from the RSV Long strain (GenBank AAX23988.1). The RSV antigen can further be human RSV nucleocapsid (“N”) protein, or fragment or variant thereof. For example, the RSV antigen can be RSV N protein, or fragment or variant thereof, from the RSV Long strain (GenBank AAX23989.1). The RSV antigen can be human RSV Phosphoprotein (“P”) protein, or fragment or variant thereof. For example, the RSV antigen can be RSV P protein, or fragment or variant thereof, from the RSV Long strain (GenBank AAX23990.1). The RSV antigen also can be human RSV Matrix protein (“M”) protein, or fragment or variant thereof. For example, the RSV antigen can be RSV M protein, or fragment or variant thereof, from the RSV Long strain (GenBank AAX23991.1). An RSV antigen can be human RSV small hydrophobic (“SH”) protein, or fragment or variant thereof. For example, the RSV antigen can be RSV SH protein, or fragment or variant thereof, from the RSV Long strain (GenBank AAX23992.1). The RSV antigen can also be human RSV Matrix protein 2-1 (“M2-1”) protein, or fragment or variant thereof. For example, the RSV antigen can be RSV M2-1 protein, or fragment or variant thereof, from the RSV Long strain (GenBank AAX23995.1). The RSV antigen can further be human RSV Matrix protein 2-2 (“M2-2”) protein, or fragment or variant thereof. For example, the RSV antigen can be RSV M2-2 protein, or fragment or variant thereof, from the RSV Long strain (GenBank AAX23997.1). The RSV antigen human can be RSV Polymerase L (“L”) protein, or fragment or variant thereof. For example, the RSV antigen can be RSV L protein, or fragment or variant thereof (e.g., GenBank AAX23996.1).

[0800] Viruses include DNA or RNA animal virus. As used herein, RNA viruses include, but are not limited to, virus families such as picornaviridae (e.g., polioviruses), reoviridae (e.g., rotaviruses), togaviridae (e.g., encephalitis viruses, yellow fever virus, rubella virus), orthomyxoviridae (e.g., influenza viruses), paramyxoviridae (e.g., respiratory syncytial virus (RSV), measles virus (MV), mumps virus (MuV), parainfluenza virus (PIV)), rhabdoviridae (e.g., rabies virus (RV)), coronaviridae, bunyaviridae, flaviviridae (e.g., hepatitis C virus (HCV)), filoviridae, arenaviridae, bunyaviridae, and retroviridae (e.g., human T-cell lymphotropic viruses (HTLV), human immunodeficiency viruses (HIV)). DNA viruses include, but are not limited to, virus families such as papovaviridae (e.g., papilloma viruses), adenoviridae (e.g., adenovirus), herpesviridae (e.g., herpes simplex viruses, e.g., HSV-1, HSV-2; varicella zoster virus (VZV); Epstein-Barr virus (EBV); cytomegalovirus (CMV); human herpesviruses, e.g., HHV-6 and HHV-7; Kaposi's sarcoma-associated herpesvirus (KSHV) and the like), and poxviridae (e.g., variola viruses). These and other viruses and viral proteins are included in the present invention and are described further in Knipe et al., Field's Virology, 4th ed., Lippincott Williams & Wilkins, 2001.

[0801] In AOTI, a viral DCA is an enveloped virus. Examples of enveloped viruses from which one or more Ags for inclusion in EPs can be obtained include Human Immunodeficiency Virus 1 (HIV-1), Human Immunodeficiency Virus 2 (HIV-2), Herpes 1 virus (HSV-1), Herpes 2 virus (HSV-2), Influenza Virus, Respiratory Syncytial Virus (RSV), Cytomegalovirus (CMV), Zika Virus (ZKV), Dengue Virus, West Nile Virus, Lassa Virus, Ebola Virus, Lloviu virus, Bundibugyo virus, Reston virus, Sudan virus, Tai Forest virus, Marburg virus, Ravn virus (RAW), Pneumovirus, Junin Virus, Rift Valley fever virus, La Crosse Virus, Porcine Reproductive And Respiratory Syndrome Virus, Poxvirus, Bovine Viral Diarrhea Norovirus, SARS Coronavirus, Chikunguya Virus, Hepatitis C Virus, Hepatitis B Virus, Schmallenberg virus, African swine fever virus, Eastern Equine Encephalitis Virus, Cowpox virus, Western Equine Encephalitis Virus, Nipah Virus, Omsk hemorrhagic fever Virus, Venezuelan Equine Encephalitis Virus, Human parainfluenza viruses, Japanese Encephalitis Virus, Tick Borne Encephalitis Virus, Russian spring-summer encephalitis (RSSE) virus, Yellow Fever Virus, Newcastle Virus, Parainfluenza virus type 5 (PIV5), Border Disease Virus (BDV) of sheep, Classical Swine Fever Virus (CSFV), Vesicular Stomatitis Virus (VSV) and HSV-2 acyclovir resistant (HSV-2 Acy R).

[0802] In AOTI, a viral antigen is specific to a virus selected from the group consisting of HIV, herpes, papillomavirus, ebola, picorna, enterovirus, measles virus, mumps virus, bird flu virus, rabies virus, VSV, dengue virus, hepatitis virus, rhinovirus, yellow fever virus, bunga virus, polyoma virus, coronavirus, rubella virus, echovirus, pox virus, varicella zoster, African swine fever virus, influenza virus and parainfluenza virus. In AOTI, a viral Ag is a fully or partially glycosylated surface glycoprotein, or fragment thereof, or a sequence of a typically glycosylated viral glycoprotein that is at least partially or fully deglycosylated. Examples of such Ags include influenza virus neuraminidase, influenza virus hemagglutinin, influenza virus M2 protein, human respiratory syncytial virus (RSV)-viral proteins, RSV F glycoprotein, RSV G glycoprotein, herpes simplex virus (HSV) viral proteins, herpes simplex virus glycoproteins gB, gC, gD, and gE, Chlamydia MOMP and PorB antigens, core protein, matrix protein or other proteins of Dengue virus, measles virus hemagglutinin, herpes simplex virus type 2 glycoprotein gB, poliovirus I VP1, envelope glycoproteins of HIV 1, hepatitis B surface antigen, diptheria toxin, Streptococcus 24M epitope, Gonococcal pilin, pseudorabies virus g50 (gpD), pseudorabies virus II (gpB), pseudorabies virus III (gpC), pseudorabies virus glycoprotein H, pseudorabies virus glycoprotein E, transmissible gastroenteritis glycoprotein 195, transmissible gastroenteritis matrix protein, swine rotavirus glycoprotein 38, swine parvovirus capsid protein, Serpulinahydodysenteriae protective antigen, bovine viral diarrhea glycoprotein 55, Newcastle disease virus hemagglutinin-neuraminidase, swine flu hemagglutinin, swine flu neuraminidase, infectious bovine rhinotracheitis virus glycoprotein E, glycoprotein G, infectious laryngotracheitis virus, infectious laryngotracheitis virus glycoprotein G or glycoprotein I, hepatitis B virus core protein and hepatitis B virus surface antigen or a fragment or derivative thereof, antigen of equine influenza virus or equine herpes virus, including equine influenza virus type A/Alaska 91 neuraminidase, equine influenza virus typeA/Miami 63 neuraminidase, equine influenza virus type A/Kentucky 81 neuraminidase equine herpes virus type 1 glycoprotein B, and equine herpes virus type 1 glycoprotein D, antigen of bovine respiratory syncytial virus or bovine parainfluenza virus, bovine respiratory syncytial virus attachment protein (BRSV G), bovine respiratory syncytial virus fusion protein (BRSV F), bovine respiratory syncytial virus nucleocapsid protein (BRSVN), bovine parainfluenza virus type 3 fusion protein, bovine parainfluenza virus type 3 hemagglutinin neuraminidase, bovine viral diarrhea virus glycoprotein 48 and glycoprotein 53, glycoprotein E of Dengue virus and glycoprotein E1 or E2 of human hepatitis C virus. Additional glycosylated viral Ags include glycoproteins of La Crosse virus, neonatal calf diarrhea virus, Venezuelan equine encephalomyelitis virus, punta toro virus, murine leukemia virus, and mouse mammary tumor virus, foot and mouth disease virus, hog cholera virus, swine influenza virus, ASFV, Mycoplasma liyopneutiioniae, and infectious bovine rhinotracheitis virus.

[0803] In aspects, an EP comprises one or more HIV Ags. HIV Ags can be from any subtype of HIV (e.g., A-D). Exemplary HIV Ags include MPol, Env A, Env B, Env C, Env D, B Nef-Rev, Gag, or any combination thereof.

[0804] In AOTI, an EP comprises an Lymphocytic Choriomeningitis Virus (LCMV) Antigen. An LCMV Ag can be an antigen from LCMV Armstrong. The LCMV antigen can be an antigen from LCMV clone 13. The LCMV antigen can be a nucleoprotein (NP) from LCMV, a glycoprotein (GP; e.g., GP-1, GP-2, and GP-C) from LCMV, a L protein from LCMV, a Z polypeptide from LCMV, a fragment thereof, a variant thereof, or a combination thereof.

[0805] A non-limiting list of infectious diseases that compositions of the invention can be used to induce, promote, or enhance immune responses in connection with include hepatitis A, B, C, D or E, herpes, herpes zoster (chicken pox), German measles (rubella virus), yellow fever, dengue fever etc. (flavi viruses), flu (influenza viruses), haemorrhagic infectious diseases (Marburg or Ebola viruses), AIDS (HIV) and other HIV-associated diseases, respiratory infections such as adenovirus infection, aspergillosis infections, avian (H5N1) influenza, influenza, RSV infections, severe acute respiratory syndrome (SARS), sinusitis, Legionellosis, viral skin diseases such as B19 parvovirus infections, warts, genital herpes, orofacial herpes, shingles, inner ear infections, fetal cytomegalovirus syndrome, bioterrorism and potential epidemic diseases such as Ebola haemorrhagic fever, Lassa fever, Marburg haemorrhagic fever, acquired immune deficiency syndrome, African swine fever, anthrax, bubonic plague, cervical cancer, chicken pox, Coxsackie, dengue fever, diphtheria, Ebola virus, echovirus, encephalitis, gastroenteritis, hepatitis, herpes, human immunodeficiency disease (HIV-1 or HIV-2), influenza, lower respiratory tract infection, Lyme disease, Marburg, measles, monkeypox, mumps, Norwalk virus infection, papillomavirus, parainfluenza, parvovirus, picorna virus infection, measles, polio, rotavirus infection, rubella, shingles, smallpox, swine flu, and yellow fever. Accordingly, EPs can comprise one or more Ags against the DCAs that are the causative agents of such diseases.

[0806] To still illustrate aspects wherein EPs comprise one or more viral Ags, exemplary aspects including constructs relevant specific types of viruses are provided in the following seven sections.

### 1) PCV

[0807] In AOTI, constructs comprise AgES(s) encoding Ag(s) of/against porcine circovirus (PCV). EP(s) can comprise any suitable number of PCV Ag(s) against any suitable type of PCV (e.g., PCV-1, PCV-2, or PCV-3, any one or more subtypes thereof, or combinations of any thereof).

[0808] In AOTI, OSMGAOA PCV Ag(s) of CEPs are AW PTPS(s), such as one or more polyUb sequences. In aspects, NS(s) comprising PCV AgESs are mostly, generally, or only contained in NAV(s). In AOTI, NAV(s) are plasmids. In aspects, NSs comprise EEI(s) associated with the PCV AgES, gDP(s), or both.

[0809] In aspects, OSMGAOA PCV Ag(s) are delivered in gDAgFP(s). In aspects, the gD portion of OSMGAOA gDAgFP(s) of such CEPESCs exhibit preferred/selective affinity for gD receptor(s) (gDR(s)) over HVEM (e.g., nectin-1, nectin-2, or homologs). In AOTI, OSMGAOA gDP(s) in such CEPs exhibit significantly reduced HVEM binding WRT to HSV-1 gD, do not exhibit significant binding of HVEM, or both. In aspects, OSMGAOA of gDAgFP(s) of such CEPs lack a functioning gD TMD. In aspects, gdAgFP(s) or other EP(s) comprise EP(s) comprising 2+, 3+, or ≥4 PCV Ag(s), wherein the PE optionally includes linker(s) (e.g., MSL(s), FL(s), or MSFL(s)), cleavage sites (e.g., SCS(s), such as 2A sites), or CT. In aspects, EP(s) include TS(s), e.g., ITS(s), such as an ERTPS, an exosome TS, PTPS(s), or CT. In aspects, OSMGAOA PCV Ag AgES(s) are contained in one or more viral vectors. In AOTI, the viral vector is a vector comprising primarily or generally comprising non-pathogenic PCV1 genes but containing anti-PCV2 Ags, anti-PCV3 Ags, or CT.

[0810] In AOTI, PCV Ag(s) are chimeras/hybrids comprising Ags of 2+ PCVs, composed of AARSs of 2 PCVs, or CT (examples of hybrid PCV Ags are exemplified in, e.g., Opriessnig T et al, 2014, CEH). In aspects, PCV Ag(s) comprise hybrid Ag(s) (e.g., PCV-2 Ag(s) and PCV-3 Ag(s)). Other hybrid Ags can be generated by, e.g., combining effective portions of bat circovirus genomes known to be related to PCV with PCV2 or PCV3 AgESs.

[0811] In aspects, OSMGAOA PCV Ag(s) of a CEP are AgV(s). In AOTI, AgV(s) comprise editope(s). In AOTI, PCV AgV(s) of CEPs ACA based on comprising GSRV(s). In aspects, GSRV(s) in PCV Ag(s), and optionally also in other EP(s), result in the CEP being AW a DOS reduction in humoral antigenicity; enhanced efficacy in promoting, inducing, or enhancing one or more aspects of IR(s); and reduced likelihood of CSAE(s), e.g., cytokine storm syndrome, Vaccine-Associated Enhanced Respiratory Disease (“VAERD”), or CT.

[0812] In AOTI, NSs of such CEPESCs are contained in plasmids that are at least primarily or generally associated with TFA(s), such as a CaPNP(s). In methods, the delivery of such CEPESCs to TR(s) comprises, PC, GCO, or CO mucosal administration of CEPESC(s) to TR(s) (e.g., pigs, humans, or both).

[0813] In aspects, CEPs comprise PCV1 Ag(s). In aspects, CEPs comprise PCV2 Ag(s) & PCV3 Ag(s); PCV2 Ag(s) & PCV1 Ag(s); PCV1 Ag(s) & PCV3 Ag(s); or a combination of PCV1, PCV2, and PCV3 Ags. In AOTI, such Ag(s) comprise AgV(s), e.g., GSRAgV(s), e.g., a PCV1 ORF1 GSRAgV, a PCV1 ORF4 GSRAgV, a PCV1 ORF2 GSRAgV, or CT.

[0814] In aspects, PCV Ag CEPs comprise non-gD PCM(s), such as PCI(s). In AOTI, a PCV Ag EP will comprise a PD-L1 antagonist CI AARS or PPT. In AOTI, a PCV Ag CEP comprises ICSTAPs, e.g., EAT-2 or SAP PPTs.

[0815] In aspects, administration of a PCV AgES CEPESC to TR(s) is repeated two or more times. In aspects, administration of a PCV AgES CEPESC is combined with the administration of an anti-PCV vaccine in a prophylactic method. In aspects, the administration of a PCV AgES CESESC is combined with one or more anti-viral therapies or therapies for the symptoms of PCV.

[0816] Administration of the PCV AgES CEPESCs induces DOS IR(s) against PCV(s). In aspects, such IR(s) comprise a significant anti-PCV T cell IR, a significant anti-PCV Ag B cell IR, or both. In aspects, a PCV Ag CEP will comprise MHCIE(s), MHCIIE(s), BCE(s), or a combination of 2 or 3 thereof.

[0817] In aspects, delivery of PCV AgES CEPESC(s) induces IR(s) against at least two subtypes of PCV (e.g., a combination of 2 or 3 of PCV2a, PCV2b, and PCV2d), two or more types of PCV (e.g., PCV2 and PCV3), or both. In aspects, the PCV Ag EPESC will elicit effective anti-PCV B and T cell immunity and durable memory responses that will recognize and destroy field-relevant PCV strains upon primary infection; clear PCV infected cells from chronically infected pigs harboring endogenous PCV (reservoir) when the virus emerges from latency; or both, in detectable or significant levels.

[0818] In aspects, the administration of an effective amount of a PCV CEPESC one or more times to TR(s) (e.g., a pig or population of pigs) results in DOS improvement in aspect(s) of the prevention, treatment, or both of one or more PCV-associated conditions, such as postweaning multisystemic wasting syndrome (PMWS), PCV2-systemic disease (PCV2-SD), or other porcine circovirus diseases (PCVDs) or an improvement in one or more clinical symptoms or other aspects thereof. For example, administration of a PCV Ag EPESC can result in a detectable or significant improvement in lymphoid depletion, lymphoid inflammation, positive IHC for PCV2 antigen of lymphoid tissue, viremia, nasal shedding, pyrexia, reduced average daily weight gain, lung inflammation, positive IHC for PCV2 antigen of lung tissue, or mortality.

[0819] In aspects, an anti-PCV AgES CEPESC will exhibit DOS PCV Ag-specific IR(s) at about 7 days post treatment (pt) or post challenge inoculation (pi); also or alternatively at about 14 days pt or pi; also or alternatively at about 28 days pt or pi; also or alternatively at about 45 days pt or pi; also or alternatively at about 60 days pt or pi; also or alternatively at about 90 days pt or pi; also or alternatively about 6 months pt or pi; also or alternatively about 12 months pt or pi; also or alternatively about 18 months pt or pi; also or alternatively about 2 years pt or pi; or also or alternatively about 3 years pt or pi. In aspects, an anti-PCV EP protected or treated pig will exhibit a reduced PCV qPCR measurement after any such period after one, two, or more PCV challenges. In aspects, an anti-PCV EP will result in a detectably or significantly reduced amount of total PCV-associated lymphoid lesions in infected or challenged pigs. In aspects, an anti-PCV EP will result in a detectably or significantly reduced number of lesions that are considered severe lesions according to standard classification practice. In aspects, an anti-PCV Ag EP will result in one or more improvements in PCV health-related indicators in a CDCD pig model as compared to similar untreated pigs under similar conditions, Circovac®-treated pigs under similar conditions or both. In aspects, an anti-PCV EP treated or protected pig will exhibit a reduction in PCV as determined by sera testing, fecal/rectal swabbing, or both, in any such period, with analysis performed by viral counting methods, ELISA, and the like. Measurement of indicators of PCV infection are described in, e.g., Palya V. Virol J. 2018; 15(1):185. doi:10.1186/s12985-018-1098-0. In aspects, delivery of an EA of anti-PCV EP as a protective method, therapeutic method or both, one or more times, results in a DOS reduction in PCV-associated disease (PCVAD) in a population of swine or a detectable or significant reduction of one or more aspects/symptoms of PCVAD such as a reduction of wasting in PCV-2 associated pigs. In aspects, an anti-PCV EP also or alternatively results in cross-protective immune responses for two, three, or more types of PCV.

[0820] In aspects, treatment or prophylaxis of PCV infection by administering an effective amount of PCV AgES CEPESC(s) results in DOS improvement in comparison to animals of a non-treated control group of the same species/class in a vaccine efficacy parameter selected from the group consisting of a reduction in loss of weight or reduced weight gain, a shorter duration of viremia, an earlier end to viremia, a lower virus load, in delay of onset of viremia, in a reduced viral persistence, in a reduction of the overall viral load and/or a reduction of viral excretion, or combinations of any or all thereof. In aspects, administration of the PCV Ag EPESC also or alternatively results in detectably or significantly reducing lymphadenopalhy, lymphoid depletion and/or multinucleated/giant histiocytes in animals infected with PCV or subsequently challenged with PCV. In aspects, administration of the PCV Ag EPESC results in detectably or significantly reducing (1) interstitial pneumonia with interlobular edema, (2) cutaneous pallor or icterus, (3) mottled atrophic livers, (4) gastric ulcers. (5) nephritis (6) reproductive disorders, e.g. abortion, stillbirths, mummies, etc, (7) Pia like lesions, normally known to be associated with Lawsonia intracellularis infections (Ileitis). (8) lymphadenopathy, (9) lymphoid depletion and/or (10) multinucleated/giant histiocytes (11) Porcine Dermatitis and Nephropathy Syndrome (PDNS), (12) PCVAD associated mortality, (13) PCVAD associated weight loss, (14). reduced growth variability (15), reduced frequency of ‘runts’ (16), reduced co- infections with Porcine Reproductive and Respiratory Disease Complex (PRRSV), or a combination of any or all thereof in a PCV infected or subsequently challenged pig (or both). In aspects, administration of a PCV AgES CEPESC results in DOS improvement in one or more economic/growth parameters in PCV infected or PCV challenged pigs such as time to slaughter, carcass weight, improvement in average weight gain, lean meat ratio, or a combination of any or all thereof. In aspects, delivery of the PCV Ag EPESC reduces the overall circovirus load including a later onset, a shorter duration, an earlier end of viremia, and a reduced viral load and its immunosuppressive impact in young animals, in particular in those having anti-PCV2 antibodies at the day of vaccination, thereby resulting in a higher level of general disease resistance and a reduced incidence of PCV2 associated diseases (e.g., PRRSV, swine influenza virus (SIV), and Mycoplasma hyopneumoniae, or a combination of any or all thereof) and symptoms. In aspects, administration of a PCV Ag EPESC also or alternatively results in a detectable or significant reduction in wasting, severe wasting, enlarged lymph nodes, respiratory illness, jaundice, or combination or any or all thereof.

[0821] In aspects, PCV AgES CEPESC(s) are administered in an effective amount to a piglet (an un-weaned pig or a pig that is about 2 months in age or less). In AOTI, an effective amount of a PCV Ag EPESC is administered to a population of pigs that still exhibits a significant amount of material anti-PCV2 antibodies. In aspects, a PCV Ag EPESC is administered to a population of swine that has an average age of less than about 12 weeks in age, less than about 10 weeks in age, less than about 8 weeks in age, less than about 7 weeks in age, less than about 6 weeks in age, less than about 5 weeks in age, or less than about 4 weeks in age (e.g., 1-10 weeks, 2-10 weeks, 3-9 weeks, 2-8 weeks, 1-8 weeks, 2-6 weeks, 1-7 weeks, 1-6 weeks, 1-4 weeks, or 2-4 weeks in age). In aspects, the PCV Ag EPESC is delivered to pigs of between about 1-30 days of age, such as about 2-30, about 3-30, about 1-21, about 3-21, about 2-24, or about 2-22 days of age. In aspects, all pigs of a population treated with a PCV Ag EPESC are within such an indicated range or below such an indicated maximum age (e.g., 6 weeks, 4 weeks, or 3 weeks of age).

[0822] In aspects, an at least as effective immune response, detectably or significant better immune response, or detectably or significantly improved clinical outcome in any of the above-described aspects is achieved from the delivery of an effective amount of a PCV Ag EPESC to pigs with a lower incidence of adverse events (e.g., a lower incidence of cytokine storm events), a lower number of required or required average administrations of medicament, or both, than with a current on-market anti-PCV vaccine, anti-PCV immunogen therapy, or any such therapy or vaccine described in the prior art.

[0823] In aspects, compositions comprising EPs expressing one or more PCV CRAs are provided. In AOTI, methods of identifying candidate PCV CRAs are provided, as exemplified in the Examples. Briefly, such methods comprise identification of putative antigens by any suitable method (e.g., ELI or from cells obtained from infected and recovered pigs or pig cells). Putative PCV Ag constructs can be developed from such materials identified from such methods (and which can be optionally combined with known PCV Ags), leading to preparation of test CEPESCs comprising corresponding AgESs, typically comprising ES(s) for gDP(s) (e.g., gDAgFP(s) comprising putative PCV Ag(s)). Such CEPESCs can then be tested in either clinical studies to identify CRAs. CRAs meeting pre-determined standards can be analyzed and sequenced to identify PCV epitopes and develop AgV(s), such as editope(s)/GSRAgV(s).

[0824] In aspects, the PCV Ag EPESC comprises, PC, or only comprises NAM(s) that are NAV(s). In aspects, NAV(s) are AW TFA(s) that DOS enhance IR(s) in TR(s). In aspects, such TFA(s) comprise CaPNP(s).

[0825] The PCV treatment and prophylaxis/vaccination methods also represent 1 facet of the AOTI directed to treatment of leaky vaccine-associated disorders. E.g., although PCV2 vaccines can reduce clinical signs of PCVAD, such on-market vaccines are “leaky” and do not provide sterilizing immunity. As such, pigs vaccinated with currently available vaccines can still become infected with PCV2 and spread the virus. Moreover, such leaky vaccines at least typically fail to confer protection from repeated PCV exposure, coinfection, and mutations that foster the spread of virus within herds and increase the PCV reservoir in a population. Use of PCV Ag EPESCs can surprisingly overcome SMGAOA aspects of such leaky vaccine associated challenges, such as detectably, generally completely, substantially completely, or completely eliminating transmission of PCV from chronically infected animals; prevent infection in a significant fraction of a herd, independent of the number of relevant PCV exposures over the lifetimes of individual members; or both.

### (b) PCV-2 and PCV2-Related Ag EP Aspects

[0826] In AOTI, CEPs comprise PCV2 Ag(s). In AOTI, CEPs comprise PCV2a Ag(s), PCV2b Ag(s), PCV2c Ag(s), PCV2d Ag(s), PCV2d-mPVCC2b Ag(s), or PCV2e Ag(s). Classification of PCV is still developing and may change in the future (SFE Franzo G, Virol J. 2015; 12:131. doi:10.1186/s12985-015-0361-x), but the efficacy of CEPs against PCVs is expected to apply regardless of such changes in classification of PCV species/strains. The biology of many PCV strains is KITA and ATAOTI (SFE Chen F et al. J Virol. 2012; 86(22):12457-12458. doi:10.1128/JVI.02290-12, with respect to a strain of PCV2d; Cheung A K. Virology. 2003; 305(1):168-180. doi:10.1006/viro.2002.1733, describing, i.a., PCV2 strain 688, which has a 236 AAR ORF2 (see also UniProt Access No. 056129); and Hamel, A. L. et al. J. Virol. 72 (6), 5262-5267 (1998) (providing the complete genome of a PCV2 virus) (see also Trible B R, Virus Res. 2012; 164(1-2):68-77. doi:10.1016/j.virusres.2011.11.018 and Karuppannan A K. Viruses. 2017; 9(5):99. Published 2017 May 6. doi:10.3390/v9050099). Numerous additional PCV strains have been sequenced and characterized in GenBank (SFE Access Nos. JX535296, JX519293, MG833033, and JQ653449 (with respect to PCV2d isolates, for example). In aspects, CEPs comprise Ag(s) of/against a PCV “mutant” strain, such as the US isolated mPCV2 (Opriessnig T et al. J Gen Virol. 2014; 95(Pt 11):2495-2503. doi:10.1099/vir.0.066423-0) or the enhanced virulence PCV2b-234-K variant (K addition in ORF2) strain (SFE Guo L et al. PLoS One. 2012; 7(7):e41463. doi:10.1371/journa.pone.0041463).

[0827] In AOTI, CEPs comprise one of a PCV-2 ORF1, ORF2, ORF3, or ORF4 or a fragment of any thereof (e.g., a fragment comprising S, M, or GA thereof). In aspects, CEPs comprise PCV2d Ag(s) or PCV2b Ag(s). In AOTI, CEPs comprise PCV Ags against 2+ PCV2 subtypes. In AOTI, CEPs comprises a PCV2 ORF3 EP (e.g., EL ORF3, GA of ORF3, most of ORF3, or some of ORF3). In aspects, CEPs comprise a PCV Rep, Rep′, or Cap protein, or CT. In AOTI, PCV Ag CEPs comprise PCV2 Ag(s) from at least two PCV2 ORFs, such as any 3 or 4 PCV2 ORFs. In AOTI, PCV2 Ag CEPs comprises PCV2 ORF2 Ag(s) and non-ORF2 PCV Ag(s), e.g., ORF1 Ag(s), ORF3 Ag(s), ORF4 Ag(s), or CT, such as an ORF3 Ag and ORF1 Ag or ORF4 Ag. In AOTI, PCV2 Ag CEPs comprise ORF2 Ag(s) & ORF3 Ag(s). In AOTI, CEPs comprise PCV2a Ag(s) & PCV2b Ag(s).

[0828] In AOTI, a PCV2 Ag CEP comprises PCV2 BCE(s), e.g., BCE(s) AW anti-PCV2 neutralizing Abs. In AOTI, any such PCV-2 Abs preferably bind endogenous PCV over EPs or do not significantly bind EPs or do not DOS impair MGAOA of the IR(s) induced by EP(s). BCEs of PCV are KITA and additional examples of such BCEs can be identified using methods DEH. Examples of such epitopes include PCV2 capsid AAs 65-87, 113-139, 169-183, and 193-207.

[0829] PCV2 Ags and related compositions and methods that can be combined with aspects of this disclosure are known in the art. For example, WO03/049703 describes production of a live chimeric vaccine is described, comprising a PCV-I backbone in which an immunogenic gene of a pathogenic PCV2 strains replaces a gene of the PCV-I backbone. WO99/18214 describes several PCV2 strains. An ORF-2 based subunit vaccine has been reported in WO2006/072065 and in WO2007/028823. A PCV2b ORF2 protein is disclosed in WO2019025519. Additional PCV2 antigens are provided in WO2006/072065 (e.g., SEQ ID NOs: 11, 10, 9, or 5 therein). Nucleotide sequences for such Ags also are KITA (e.g., SEQ ID NOs: 3 and 4 therein). Additional PCV2 Ags, sequences, and methods are described in, e.g., US20180236057; US20150056248; US20170232094; US20160206727; WO2008076915; U.S. Ser. No. 10/131,696 and U.S. Pat. No. 9,932,372. PCV2 T cell epitopes are described in, e.g., Stevenson L S et al. Viral Immunol. 2007; 20(3):389-398. doi:10.1089/vim.2006.0106 and Wyatt, C., 2009, Mapping T cell epitopes in PCV2 capsid protein, National Pork Board Report, available at https://www.pork.org/research/mapping-t-cell-epitopes-in-pcv2-capsid-protein/. PCV Ags, epitopes, and related compositions are disclosed in, e.g., WO2017/187277; UniProt Access Number F5A4Z4; CN103536912; Mahe D et al. J Gen Virol. 2000; 81(Pt 7):1815-1824. doi:10.1099/0022-1317-81-7-1815; and Bandrick M et al. Vet Immunol Immunopathol. 2020; 223:110034. doi:10.1016/j.vetimm.2020.110034. PCV Ag EPs can comprise any PCV Ag(s) or epitope(s) described in these references or that are otherwise KITA. Methods for treating PCV infections and preventing PCV infections can employ any suitable methods, compositions, or standards therein.

[0830] In AOTI, CEPs comprise PCV2 AgV(s), e.g., PCV2 editope(s). An example of such an AgV is a variant comprising a modification at position 143, 145, or both, typically position 143, resulting in deletion of a potential NLGS.

[0831] In AOTI, PCV2 AgV(s) exhibit enhanced antigenicity as compared to WTC(s). An example of such an editope is the chimeric PCV2 ORF2 protein in the chimeric virus PCV2-3cl, generated through application of gene shuffling methods (see WO2017187277), or a related antigenic virus developed by application of such gene shuffling techniques (e.g., a PCV2 capsid polypeptide selected from the PCV capsid polypeptides designated as 3cl.14 (SEQ ID NO: 8 of WO2017187277), 3cl. 13 (SEQ ID NO: 4 of WO2017187277), 3cl.4_2 (SEQ ID NO: 2 of WO2017187277), and 3cl. 12_2 (SEQ ID NO: 6 WO2017187277).

[0832] In aspects, CEPs comprising PCV2 Ag(s) are CB the lack of any PCV2 decoy epitopes or the removal of any PCV2 decoy epitopes (through substitution or deletion). PCV2 decoy epitopes are known and DEH.

[0833] In AOTI, CEPs comprise Ags from/related to PCV2 ORF9. In AOTI, CEPs comprise a PCV2 Ag comprising an AARs RVRHRSIOI to SEQ ID NO:654.

[0834] In aspects, an EP will comprise one or more Ags from or that are at least related to a PCV2 ORF1 sequence. In AOTI, an EP will comprise a PCV2 Ag comprising a sequence that RVRHRSIOI to SEQ ID NO:654. In AOTI, CEPs comprise a GSRAgV(s) of an ORF1 sequence, e.g., 1+ of SEQ ID NOs:655-657

[0835] In aspects, CEPs comprise Ag(s) of related to a PCV2 ORF3 sequence. In AOTI, CEPs comprise PCV2 Ag(s) RVRHRSIOI to SEQ ID NO:658.

[0836] In aspects, CEPs comprise Ag(s) from or related to a PCV2 ORF4 PPT. In AOTI, CEPs comprise PCV2 Ag(s) RVRHRSIOI to SEQ ID NO:659. In aspects, CEPs comprise GSRVs of ORF4 PPTs (e.g., SEQ ID NO:660) or FFs/FVs.

[0837] In aspects, CEPs comprise Ag(s) from or related to a PCV2 ORF8 PPT. In AOTI, CEPs comprise PCV2 Ag(s) are RVRHRSIOI to SEQ ID NO:661.

[0838] In aspects, CEPs comprise Ag(s) from or related to a PCV2 ORF11 PPT. In AOTI, CEPs comprise PCV2 Ag(s) RVRHRSIOI to SEQ ID NO:662.

[0839] In aspects, CEPs comprise Ags from or related to a PCV2 ORF5 PPT. In AOTI, CEPs comprise a PCV2 Ag RVRHRSIOI to SEQ ID NO:663.

[0840] In aspects, CEPs comprise Ag(s) from or related to PCV2 ORF10 PPTs. In AOTI, comprise PCV2 Ag(s) RVRHRSIOI to SEQ ID NO:664.

[0841] In aspects, CEPs comprise Ag(s) from or related to PCV2 ORF7 PPTs. In AOTI, CEPs comprise PCV2 Ag(s) RVRHRSIOI to SEQ ID NO:665.

[0842] In aspects, CEPs comprise Ag(s) from or related to a PCV2 ORF2 PPT. In AOTI, CEPs comprise PCV2 Ag(s) RVRHRSIOI to SEQ ID NO:24. In aspects, CEPs comprise PCV2 ORF2-related GSRVAg(s) (e.g., SEQ ID NO:25 or SEQ ID NO:666). In AOTI, CEPs include PCV2 ORF2 FVs per the formula MTYPRRRX₈RRRRHRPRSHLGX₂₁ILRRRPWLVHPRHRYRWRRKNGIFNX₄₇RLSRX₅₂X_{5 3}X₅₄YTX₅₇X₅₈X₅₉X₆OX₆₁VX₆₃TPSWAVDMMRFX₇₅X₇₆X₇₇X₇₈FVPPGGGX₈₆NX₈₈X₈₉ X₉₀IPFEYYRIRKVKVEFX₁₀₆X₁₀₇X₁₀₈SPITQGDRGVGSTAVILX₁₂₆DNFVTKATALTYDP YVX₁₄₃YSSRHTIPQPFSYHSRYFTPKPVLDSTIDYFQPNNKRNLWLRLQTX₁₉₀X₁₉₁NVDH VGLGX₂₀₀AFX₂₀₃NSX₂₀₆X₂₀₇X₂₀₈QX₂₁₀YNX₂₁₃RX₂₁₅TMYVQFREFNLKDPPLX₂₃₂X_{23 3}X₂₃₄X₂₃₅ (SEQ ID NO:668), wherein X8 is Y or F, typically Y; X21 is Q, L, or H, typically Q; X47 is T, A, or S, typically T/A; X52 is T or S; X53 is F or I, typically F; X54 is G or V; X57 is V or I, typically V; X58 is K or N; X59 is A or R; X60 is T or S; X61 is T or Q; X63 is R, S, or T; X75 is D, N, or K, typically D/N; X76 is I or F, typically I; X77 is D or N; X78 is D or Q; X86 is T or S; X88 is K or P; X89 is I, R, or L; X90 is S or T; X106 is W of R; X107 is P or A; X108 is C or R; X126 is T or S, usually T; X143 is D or N, usually D; X190 is S, A, or T, typically S or T; X191 is R, G, or K, typically R or G; X200 is T or H; X203 is E or Q; X206 is I, T, or K, typically T; X207 is Y or N; X208 is D or A; X210 is D, E, or A, typically D or A; X213 is I or V; X215 is I or V, typically V; X232 is K or N, typically K; X234 is P, K, or is absent, typically P or K; & X235 is K or is absent.

[0843] In aspects, PCV2 AgES CEPs encode PCV2 Ag mimotope(s). Examples of PCV2 Ag mimotopes and related PMCs are in, e.g., Hung L C et al. BMC Immunol. 2017; 18(1):25. doi:10.1186/s12865-017-0211-2 and WO2006/072065. Other mimotope methods DEH are adaptable to such AOTI.

[0844] In aspects, PCV2 Ag EPs can also or alternatively comprise one or more hybrid Ags comprising one or more non-PCV2 Ags. Such methods can be relevant given the prevalence of PCV2 co-infections, such as SIV & PRRSV. As such, in aspects, PCV Ag EPs additional comprise Ag(s) of/against any such potential PCV co-infection agents. Examples of hybrid PCV2 Ags, e.g., are described in, e.g., Pineyro P E et al. Virus Res. 2015; 210:154-164. doi:10.1016/j.virusres.2015.07.027 and Li X et al. Appl Microbiol Biotechnol. 2018; 102(24):10541-10550. doi:10.1007/s00253-018-9361-2. Such Ags and targets can be employed in PCV2 Ag CEPs.

[0845] In aspects, a PCV2 Ag EP will comprise one or more polyepitope fusion proteins. In aspects, one, some, generally all, or all of such polypeptide sequences will be contained in gDAgFPs. In aspects, at least one polyepitope sequence will comprise one or more linkers (e.g., mid-sized or flexible linkers), one or more cleavage sites, one or more PTPSs (e.g., one or more polyUb sequences) or other ITSs, or a combination of any or all thereof. In aspects, at least one Ag of a polyepitope sequence will comprise an Ag variant, such as a deglycosylation variant. In aspects, PE(s) will comprise Ag(s) from at least two, ≥3, ≥4, ≥5, ≥6, or at least seven PCV2 ORFs (e.g., 2-8 PCV2 ORFs, 2-7 PCV2 ORFs, 2-5 PCV2 ORFs, or 2-3 PCV2 ORFs). In aspects, a polyepitope sequence also or alternatively will comprise at least two, at least three, at least four, at least five, at least six, at least seven or more discrete Ag sequences (e.g., 2-12, 2-10, 2-8, 2-7, 3-15, 3-12, 3-9, or 3-7 discrete Ag sequences), most, generally all, or all of which are PCV2 Ag sequences (including variants). An example of such a construct is a construct according to the formula gD1-optional linker-ORF9Ag-linker-ORF4Ag-linker-ORF8Ag-linker-ORF11Ag-linker-ORF10Ag-linker-ORF6Ag-linker-ORF7Ag-optional linker-gD2 (exemplary gD1 and gD2 sequences are described elsewhere herein).

[0846] Several vaccines against PCV2 are commercially available. Porcilis® PCV (available from MSD Animal Health, Boxmeer, The Netherlands) is a vaccine for protection of pigs against porcine circo virus type 2, for use in pigs from three weeks and older. When given as a two-shot (two dose) vaccine, the duration of immunity (DOI) is 22 weeks. CircoFlex® (available from Boehringer Ingelheim, Ingelheim) is a vaccine for protection of pigs against porcine circo virus type 2, for use in pigs from two weeks and older. It is registered as a one-shot (one dose) vaccine only. Circovac® (available from Merial, Lyon, France) is a vaccine for protection of pigs against porcine circo virus type 2, for use in pigs three weeks and older. Suvaxyn® PCV (available from Zoetis, Capelle a/d IJssel, The Netherlands) is a vaccine for protection of pigs against PCV2, for use in pigs 3 weeks and older. Other PCV2 vaccines are described in WO2007/028823, WO 2007/094893, and WO2008/076915. All on-market recombinant vaccines target the immunogenic capsid protein of the virus encoded by ORF2, while the conventional, inactivated vaccines are whole virus preparations (Beach and Meng, 2012). Such vaccines can be combined with a PCV AgES CEPESC or can be administered in AW PCV AgES CEPESC(s).

[0847] In aspects, an effective amount of a PCV2 Ag EPESC will exhibit a detectably or significantly improved immune response in one or more aspects as compared to a recommended dose (e.g., 0.5 ml in piglets or 2 ml in mature pigs) of Circovac®, an FDA approved PCV treatment or over any of the other above-described approved treatment/vaccines administered according to their recommended application regimens. In AOTI, EPs exhibit a better immune response in one or more respects against more types of PCV2 viruses. In aspects, EPs also or alternatively exhibit an immune response that is detectably better or significantly better than Circovac® against PCV2A viruses. In aspects, the improved immune response comprises a significantly better memory immune response than Circovac® or any other 1+, 2+, or all of the other above-described commercial on-market vaccines. In aspects, the improved immune response comprises a significantly better T cell response, a significantly better innate trained immune response, or both, as compared to any one, some, or all of such on-market vaccines. In aspects, an EP will result in significantly reduced shedding, significantly reduced PCV-associated viremia, or both, as compared to any one, some, or all of such vaccines, and in aspects administration of an PCV2 Ag EPESC will result in significantly improved shedding reduction, significantly reduced PCV-associated viremia, or both, as compared to Circovac® or any other OSMOA of the on-market PCV2 vaccines. In aspects, an EP will exhibit any of the above-described improved responses as compared to Circovac® or any other one, some, or all of the on-market PCV2 vaccines/treatments in PCV2d pigs. Clinical experience with Circovac® in PCV2a and PCV2d pigs ATAOTI is KITA (SFE Opriessnig T et al. Vaccine. 2017; 35(2):248-254. doi:10.1016/j.vaccine.2016.11.085).

[0848] In aspects, a PCV Ag EP will comprise a PPT comprising an AARS that is at least about 70%, 80%, 85%, 90%, 95%, 97%, or 99% identical to an at least 8 AA AARS, an at least 12 AAAARS, an at least 15 AAAARS, ≥20 AA AARS, ≥50 AA AARS, or ≥100 AA AARS in, e.g., SEQ ID NO: 24 and that induces significant IR(s) against PCV(s) when expressed in TR(s). In AOTI, an EP comprises SEQ ID NO: 25. In AOTI, an EP comprises SEQ ID NO: 24.

### (c) PCV-3 and PCV3-Ag EP Aspects

[0849] In aspects, an EP will also or alternatively comprise one or more PCV3 Ags. PCV3 has recently been identified as a virus that is distinct from and distantly related to other PCVs and causes porcine dermatitis and nephropathy syndrome (PDNS) and reproductive failure in non-PCV2-infected pigs. See Palinski R et al. J Virol. 2016; 91(1):e01879-16. Published 2016 Dec. 16. doi:10.1128/JVI.01879-16. The genomes of PCV3 strains are described in, e.g., Fan S et al. Genome Announc. 2017; 5(15):e00100-17. doi:10.1128/genomeA.00100-17 and Tochetto et al. Transbound Emerg Dis. 2018 February; 65(1):5-9. doi: 10.1111/tbed.12735. Epub 2017 Oct. 12. The genomic sequence of PCV3/CN/Hubei-618/2016 has been deposited at GenBank under the accession number KY354039. Additional strains are recorded under GBANs KX458235, KY996344, and KY96345 (Fux R et al. Virol J. 2018; 15(1):25. doi:10.1186/s12985-018-0929-3). Additional aspects of PCV3 biology are described in, e.g., Li G, et al. Adv Sci (Weinh). 2018; 5(9):1800275. doi:10.1002/advs.201800275. Classification of PCVs is still a challenging and evolving field. SFE Fux R et al. Virol J. 2018; 15(1):25. Published 2018 Jan. 29. doi:10.1186/s12985-018-0929-3. Accordingly, current limits of classification & nomenclature should not limit the scope of PCV-related aspects.

[0850] In AOTI, a PCV3 Ag comprises one or more PCV3a Ags, one or more PCV3b Ags, or a combination of at least one of each such type of PCV3 Ag.

[0851] In aspects, a PCV3 Ag EP will comprise a PCV3 ORF1 sequence, a PCV3 ORF2 sequence, a fragment of either or both, or a variant of any or all thereof. ORF1 encodes for Rep and Rep′ proteins involved in replication initiation. ORF2 encodes the Cap structural protein. PCV3 Ag EPs can comprise any combination of Rep, Rep′, and Cap sequences. In AOTI, a PCV3 Ag EP comprises a Cap protein having a sequence RVRHRSIOI to SEQ ID NO:728, a fragment thereof, or a functional variant of either thereof. In aspects, a PCV3 Ag EP comprises a Rep Ag having a sequence RVRHRSIOI to SEQ ID NO:727, an antigenic fragment thereof, or a variant of either thereof. In aspects, a PCV3 Ag is one of the PCV3 Ags described in US20180305410, such as SEQ ID No. 2, 4, 6, or 8 thereof, or any combination thereof. In aspects, a PCV3 Ag EP comprises SEQ ID NO:6 of the '410 application.

[0852] In aspects, a PCV3 Ag also or alternatively comprises a truncated Rep protein or other PCV Ag homolog, such those that occur in PCV3-CN2018LN-4 (MH277118). SFE Ha Z et al. BMC Vet Res. 2018; 14(1):321. doi:10.1186/s12917-018-1634-6. Compared to a highly diverse PCV3 strain (GD2016-1, KY421347), five Vietnamese PCV3 strains contained 39 point nucleotide mutations in the Cap-encoding sequence and 9 of those were non-synonymous. Nguyen V G, Chung H C, Huynh T M L, et al. (2018) Molecular Characterization of Novel Porcine Circovirus 3 (PCV3) in Pig Populations in the North of Vietnam. Arch Gene Genome Res 1(1):24-32. Any variations also can be used to design consensus sequence PCV3 variant Ags.

[0853] In AOTI, one or more PCV3 Ags are deglycosylation site variants. Examples of such variants of a Rep protein, for example, include sequences RVRHRSIOR to one or more of SEQ ID NOs. 724-726.

[0854] In aspects, one or more PCV3 Ags are from PCV3/CN/Hubei-618/2016, PCV3/USA/MO2015 (Genbank Accession No. (GBAN) KX778720.1), PCV3/USA/SD2016 (GBAN KX966193.1), PCV3/USA/MN2016 (GBAN KX898030.1), PCV3/USA/29160 (GBAN NC031753.1), PCV3/USA/2164 (GBAN KX458235.1), and PCV3/USA/29160 (GBAN KT869077.1).

[0855] In AOTI, a PCV3 Ag will also promote, induce, or enhance a detectable or significant response against one or more types of PCV2. In aspects, an EP can comprise one or more PCV2 Ags that detectably or significantly induce an immune response against PCV3. In aspects, one, some, most, or all of the PCV3 Ags in an EP will not induce a significant response against PCV2 or vice versa. A PCV3 Ag EP can comprise any suitable PCV3 Ag(s) from any suitable PCV3 & of any suitable PCV3 PPT, FF, or related PPT.

[0856] In aspects, a PCV3 Ag EPESC detectably or significantly induces an immune response against one or more strains of PCV3, such as one or more T cell responses, B cell responses or both. In aspects, a PCV3 Ag EP comprises at least one MHC I epitope, at least one MHC II epitope, or both types of epitopes. In aspects, a PCV3 Ag EP also or alternatively comprises at least one B cell epitope. In aspects, an effective amount of a PCV3 Ag EPESC detectably or significantly reduces the amount of PCV3 nucleic acid measured in PCV3 infected or challenged pigs (e.g., by qPCR). In aspects, an effective amount of a PCV3 Ag EPESC detectably or significantly reduces the amount of PCV Ag detected in PCV3 infected or challenged pigs, such as by immunohistochemistry (IHC) analysis, ELISA, and the like.

[0857] In aspects, an effective amount of a PCV3 Ag EPESC detectably or significantly reduces PCV3-associated porcine dermatitis and nephropathy syndrome (PDNS), reproductive failure, or both. In aspects, an effective amount of a PCV3 Ag EPESC detectably or significantly reduces the number of abortive fetuses in PCV3 infected pigs. In aspects, an effective amount of a PCV3 Ag EPESC detectably or significantly reduces histologic lesions in PCV3 infected or challenged pigs. In aspects, an effective amount of a PCV3 Ag EPESC detectably or significantly reduces viremia, viral shedding, lesions or gross lesions, incidence of swelling (moderate/severe swelling) or discoloration of lymphoid tissues, multisystemic inflammation, myocarditis, or a combination of any or all thereof in PCV3 infected or challenged pigs. In aspects, an effective amount of a PCV3 Ag EPESC detectably or significantly reduces porcine respiratory disease complex (PRDC) or one or more symptoms thereof such as coughing, dyspnea, fever, anorexia, gastro-intestinal disorders (e.g., diarrhea), or tremors in PCV3 challenged or infected pigs. Aspects of some of such phenomena in PCV3 infected pigs are described in, e.g., Klaumann F et al. Front Vet Sci. 2018; 5:315. doi:10.3389/fvets.2018.00315.

[0858] In aspects, a PCV3 Ag EPESC is delivered one or more times to piglets as a preventive treatment/vaccine, such as any of the ages described above with respect to PCV2 methods. In aspects, a PCV3 Ag EPESC is delivered as a therapeutic to PCV3 infected pigs. In aspects, a PCV3 Ag EPESC is combined with one or more other PCV3 vaccines or PCV3 treatments, in combined dosage forms or associated treatment methods.

[0859] In aspects, a PCV3 Ag EP comprises one or more putative PCV3 CRAs. In aspects, a PCV3 Ag EP comprises one or more CRAs that were established as CRAs by practicing CRA-identification methods provided herein.

[0860] In aspects, a PCV3 Ag EP comprises one or more heterologous Ags associated with typical PCV3 co-infections. In aspects, a PCV3 Ag EP comprises one or more porcine parvovirus Ags, such as one or more PPV6 Ags, PPV7 Ags, or PPV6 and PPV7 Ags.

### 2) PRRSV—Porcine Reproductive and Respiratory Syndrome Virus

[0861] In aspects, CEPs comprise Ag(s) of, related to, and that induce IR(s) against PRRSV (PRRSV Ag(s)). A PRRSV AgES CEPESC can comprise any suitable number of PRRSV AgES(s) encoding PRRSV Ag(s) from any suitable type of PRRSV and PRRSV PPT(s). In aspects, a PRSSV AgES CEPESC encodes 1+ or 2+ PE(s) comprising 2+ PRRSV Ag(s). In aspects, SMGAOA Ag(s) in such PE(s) are bound by linkers (e.g., FLs, MSLs, or MSFLs), AW cleavage sites (e.g., SCS/2A sites), or both. In aspects, OSMGAOA Ag(s) of PRRSV Ag PE(s) are AW one or more ITS(s), e.g., PTPS(s), e.g., polyUb sequence(s).

[0862] PRRSV Ag CEPs can comprise Ag(s) of or related to any suitable type of PRRSV, any suitable strain of PRRSV, & any suitable PPT. In aspects, a PRRSV Ag EP comprises one or more type 1 PRRSV Ags, one or more type 2 PRRSV Ags, or both type 1 and type PRRSV Ags. In aspects, an EP comprises one or more Ags of a type 1 PRRSV strain, such as PRRSV-1 Lelystad (GenBank accession # M96262). In aspects, an EP comprises one or more Ags of a type 2 PRRSV strain, such as type 2 PRRSV strain VR-2332 (GenBank accession #AY150564). New PRRSV strains continue to be identified and Ags from such new strains can also or alternatively be used in PRRSV Ag EPs. SFE Chen N et al. Transbound Emerg Dis. 2019; 66(1):28-34. doi:10.1111/tbed.13026.

[0863] In aspects, a PRRSV Ag EP comprises an AARS comprising some, most or all of a PRRSV ORF1a (e.g., comprising some, most, generally all or all of one or more of nsp1α, nsp1β, or nsp2) or an at least related variant sequence. In aspects, a PRRSV Ag EP also or alternatively comprises an AARS comprising some, most or all of a PRRSV ORF1a′-TF (e.g., comprising some, most, generally all, or all of one or both of nsp2TF or nsp2N) or an at least related variant thereof. In aspects, a PRRSV Ag EP also or alternatively comprises an AARS comprising some, most or all of a PRRSV ORF1a (e.g., some, most, generally all, or all of one or more of nsp3, nsp4, nsp5, nps6, nsp8, nsp7a, and nsp7p). In aspects, a PRRSV Ag EP also or alternatively comprises an AARS comprising some, most or all of a PRRSV ORF1b (e.g., some, most, generally all, or all of one or more of nsp9, nsp10, nsp11, and nsp12). In aspects, a PRRSV EP also or alternatively comprises an AARS comprising some, most or all of a PRRSV ORF2a/GP2a sequence. In aspects, a PRRSV Ag EP also or alternatively comprises an AARS comprising some, most or all of a PRRSV ORF2b/protein E sequence. In AOTI, PRRSV Ag(s) comprise SMGAOA of a PRRSV ORF4/GP4 PPT. In aspects, PRRSV Ag EPs comprise SMGAOA of a PRRSV ORF5/GP5 PPT. In aspects, a PRRSV Ag EP also or alternatively comprises an AARS comprising SMGAOA of a PRRSV ORF5a PPT. In aspects, a PRRSV Ag EP comprises SMGAOA of a PRRSV ORF6/protein M PPT.

[0864] In aspects, a PRRSV Ag EP comprises a PRRSV ORF3/GP3 PPT Ag, a PRRSV ORF7/protein N PPT Ag, or a combination thereof, optionally in combination with any of the above-described PRRSV Ag(s). In AOTI, a PRRSV Ag EP comprises PRRSV ORF3 Ag(s). In aspects, a PRRSV Ag EP comprises one or more PE(s) (optionally comprising MSLs, FLs, MSFLS, or SCSs or comprising one or more Ag-associated ITSs, e.g., PTPS(s), e.g., polyUb(s). A PRRSV AgES CEPESC can comprise a non-gD PCI, an ICSTAP, or both. In aspects, NAMs of a PRRSV AgES CEPESC are plasmids associated with CaPNPs.

[0865] In an exemplary aspect, a PRRSV Ag EP comprises at least one AARS that is at least about 80% or at least about 90% identical, such as at least about 95%, 97%, or 99% identical to an at least 8 amino acid sequence, at least 12 AARS, at least 15 AARS, or ≥20 AARS contained in SEQ ID NO:11 that induces DOS IR(s) against PRRSV when expressed in TR(s). In aspects, a PRRSV Ag EP comprises ≥50 AAs, ≥100 AAs, or MGASAOA of SEQ ID NO:11.

[0866] In aspects, a PRRSV Ag EP comprises a variant Ag AARS. In aspects, a PRRSV AgV EP comprises GSRV(s). In aspects, a PRRSV Ag EP comprises a GSRV of a PRRSV GP2a-b, GP3, GP4, GP5, GP5a, M, or N protein, or CT. In aspects, a PRRSV Ag EP comprises SEQ ID NO:13 or a fragment comprising at least 25% most generally all, of or substantially all thereof. In aspects, a PRRSV Ag EP EP comprises SEQ ID NO:12 or a fragment comprising at least about 10 AAs, at least about 20 AAs, at least about 25 AAs, at least about 50 AAs, most, generally all, or substantially all thereof. In aspects, a PRRSV also or alternatively comprises a variant in which a decoy epitope (e.g., a decoy epitope in the M protein or GP5) is removed via AA substitution or deletion (SFE U.S. Pat. No. 9,441,015 and AOTI DEH).

[0867] In aspects, a PRRSV Ag EP comprises one or more PRRSV T cell epitopes (e.g., SEQ ID NO:668); see also CN103242427A). In aspects, a PRRSV Ag EP comprises MHCIE(s), MHCIIE(s), or CT. In aspects, a PRRSV Ag EP also or alternatively comprises one or more BCE(s) (e.g., SEQ ID NO:669); see also Chen Z et al. J Gen Virol. 2010; 91(Pt 4):1047-1057. doi:10.1099/vir.0.016212-0; An T Q et al. Virus Genes. 2005; 31(1):81-87. doi:10.1007/s11262-005-2203-1; de Lima M et al. Virology. 2006; 353(2):410-421. doi:10.1016/j.virol.2006.05.036; Oleksiewicz M B et al. J Virol. 2001; 75(7):3277-3290. doi:10.1128/JVI.75.7.3277-3290.2001; CN109554375A; and Shi X et al. Int J Biol Macromol. 2019; 139:1288-1294. doi:10.1016/j.ijbiomac.2019.07.171). PRRSV epitopes have been identified and others have been predicted. Any suitable one or more of such PRRSV epitopes can be contained in PRRSV Ag EPs. Additional PRRSV epitopes (including mimotopes), AgES constructs, strains, and methods are KITA and ATAOTI. SFE Pan X et al Front Immunol. 2020; 10:2995. doi:10.3389/fimmu.2019.02995; WO2007062851; EP1882696; EP2457583; US20120040335; US20110293655; CN102488895; CN103421817; CN105671064; Chen C et al. Vaccine. 2013; 31(14):1838-1847. doi:10.1016/j.vaccine.2013.01.049; U.S. Pat. No. 8,182,984; U.S. Ser. No. 10/300,123; & Oleksiewicz M B et al. J Gen Virol. 2002; 83(Pt 6):1407-1418. doi:10.1099/0022-1317-83-6-1407; R. Parida. Cell-Mediated Immunity in Porcine Reproductive and Respiratory Syndrome Virus Syndrome Virus. Available at https://digitalcommons.unl.edu/cgi/viewcontent.cgi?referer=https://www.google.com/&httpsredir=1&article=1010&context=vetscidiss; & U.S. Pat. No. 7,465,455.

[0868] In aspects, PRRSV Ag CEPs comprises non-PRRSV Ag(s) from/related to DCA(s) that commonly co-infect swine with PRRSV. In AOTI, SMGAOA of non-PRRSV Ag(s) in such a CEP are PCV Ag(s). Combined PRRSV/PCV constructs and Ags KITA can be adapted to use in such CEPESCs. SFE CN103059142. In aspects, PRRSV AgES CEPESC(s) are delivered to PRRSV/PCV co-infected TR(s) (e.g., pigs) & the method DOS improves one or more virus infection symptoms or conditions in such pigs. Such conditions are described in, e.g., Jung K et al. J Gen Virol. 2009; 90(Pt 11):2713-2723. doi:10.1099/vir.0.014001-0. Additional examples of co-infections DCAs include P. multocida, S. suis, H. parasuis, porcine respiratory coronavirus (PRCV), Mycoplasma hyopneumoniae (M. hyo), and Actinobacillus pleuropneumonia (APP). Methods can comprise administration of two or more NAMs comprising, respectively, PRRSV Ag EPs and one or more such co-infectious DCA Ag EPs or associated administration of such EPESCs (alone or in combination with other vaccines or treatments). The invention also provides CEPESCs comprising one or more Ags against such agents, independently of any PRRSV Ags.

[0869] In aspects, a PRRSV Ag EP, PRRSV Ag EPESC, or both, induces one or more DOS IRs against one or more types of PRRSV. In aspects, the IR comprises an enhanced expression of one or more cytokines, such as IFNγ, IL-8, IL-1β, TGF-β, or a combination of any or all thereof. In aspects, an IR comprises an increase in proliferation, development, activity, or a COAOAT in one or more other ICs, such as B cells, NK cells, γδT cells early, and αβT cells. In aspects, the IR comprises a T cell immune response. Detection of T cell responses in PRRSV cases are exemplified in, e.g., Bautista E M, et al. Viral Immunol. 1997; 10(2):83-94. doi:10.1089/vim.1997.10.83. In aspects, an IR is an increase in IC frequency, e.g., T cell frequency, of at least 2×, at least 2.5×, or at least 3× over baseline in PRRSV infected or challenged pigs by 2-10 weeks post vaccination. In aspects, the IR comprises a DOS increase in NKC activity, such as NKC cytotoxicity. In aspects, the IR comprises a reduction in TReg suppression of anti-PRRSV responses. In aspects, the IR comprises a detectable or significantly enhanced memory immune response, an upregulation of anti-PRRSV macrophage activity, or both. In aspects, an IR leads to one or more reductions in PRRS frequency, severity, duration, or symptoms or clinical indicators, such as a detectable or significant reduction in shedding, viremia, or both. In aspects, an IR comprises a detectable or significantly lower rate of PRRSV co-infection. Other aspects of PRRSV effects on the immune system & PRRSV biology is provided in Lunney J K. Annu Rev Anim Biosci. 2016; 4:129-154. doi:10.1146/annurev-animal-022114-111025.

[0870] In aspects, the delivery of EA(s) of PRRSV CEPESC(s) results in an at least as effective or DOS more effective IR(s) in one or more aspects, CE(s) in 1+ aspect(s) (individually or in a population), or both, WRT to on-market or otherwise described PRRSV vaccines, such as, e.g., FOSTERA® PRRS (Zoetis, USA) or OSMGAOA of the vaccines described in Taeyeon Kim et al. Clinical and Vaccine Immunology May 2015, 22 (6) 631-640; DOI: 10.1128/CVI.00001-15 or Oh T, et al. Canadian Journal of Veterinary Research 2019 January; 83(1):57-67. In aspects, a PRRVS EPESC achieves such similar or improved IRs with less administrations than required to achieve such effects using such vaccines KITA.

### 4) Influenza

[0871] In aspects, CEPs comprises influenza virus (“IV”) Ag(s). CEPs can comprise any suitable number of IV Ags AW any suitable kind of IV(s) and IV PPT(s). A CEP can comprise IV Ag(s) AW IVs that typically infect 1+ or 2+ species, such as swine influenza virus (SIV), canine influenza virus (CIV), avian influenza virus, or human influenza virus (“HSIV”—the abbreviation HSIV is used for human influenza viruses to avoid confusion with HIV). In aspects, a CEP comprises IV Ags AW IVs that AW with infections of 2+ species, such as dogs & humans; cats & humans; birds & humans; or CT (e.g., FIV Ags, CIV Ags, and HSIV Ags). This principle can AOA be applied to other viral conditions AW species-to-species transmission in other AOTI (e.g., PCV or COV). One AOTI is inhibition/reduction of species-to-species pathogen DCA transmissions, e.g., preventing from NHAs to humans or wild animals to domesticated NHAs.

[0872] IV Ag(s) can be from or related to any suitable type or subtype of IV. For example, HSIV Ags can be from or related to type A, type B, or type C HSIVs and can comprise Ags of any subtypes thereof (e.g., H1N1, H1N2, H3N2, or H7N2 HSIV Ags, or H10N8 Ags). In aspects, a CEP comprises multiple IV Ags from a species, multiple IV Ags from multiple species, or both. For example, a CEP can comprise H1N1, H1N2, H3N2, and H7N2 Ags; type A and type B HSIV Ags; or a combination thereof, or further subtypes thereof (e.g., pH1N1). An IV type A or type B Ag can be primarily associated with IVs that infect birds, pigs, horses, cats, dogs, humans, or non-human primates. In aspects an IV Ag CEP comprises an avian IV Ag, such as an H5N1 or H3N2 avian IV Ag. An IV Ag can be from any one of the IVs mentioned in the extensive list of IV strains and serotypes provided in WO2016205347.

[0873] In aspects, IV Ag(s) comprise a hemagglutinin (HA or H) AARS(s), such as an H1, H2, H3, H4, H5, H6, H7, H8, H9, H10, H11, H12, H13, H14, H15, H16, H17, or H18 AARS (as always, such AARSs also comprise FFs and FVs, e.g., editope variants, GSRVs, and the like). In aspects, the CEP comprises Ag(s) of or related to a HA head domain (HA1), and optionally lack or comprising a HA cytoplasmic domain, HA transmembrane domain, or a combination. In aspects, CEP(s) comprise Ag(s) from a H7N9 IV, a H10N8 IV, or CT. In AOTI, CEPs comprise flu year Ag(s). A “flu year antigen” is an antigen selected from a strain of HSIV used as a component of a yearly flu vaccine (e.g., strain A/Port Chalmers/1/1973(H3N2)-like virus, represents a strain component of the Northern Hemisphere vaccine from 1974-1975).

[0874] In AOTI, an IV Ag CEP comprises gDAgFP(s). In aspects an IV Ag CEP includes an ICITM(s)/ICSTAP(s), e.g., EAT-2 PPT(s). In aspects, IV Ag CEPs comprise NonCMIP(s), e.g., cytokine(s). In aspects, IV Ag CEPs comprise a NGDCI (e.g., a PD-L1 or CDR112R CI). In AOTI, IV Ag CEPs comprise a gDS that is a CI. In aspects, an IV Ag CEP comprises MgDS(s), such as in OSMA gDAgFPs. In aspects, EP(s) of IV Ag CEPs are encoded on different NAMs.

[0875] In aspects, an IV Ag CEP comprises ≥2, e.g., 2-20, 3-30, 4-24, 5-25, 5-15, 2-12, 3-12, 4-12, or 5-10 IV Ags. In aspects, an IV Ag CEP comprises PE(s) PCGCOSCOOCO IV Ag(s). In aspects, OSMGAOA of the IV Ags of a CEP are associated with ITS(s), e.g., PTPS(s), e.g., polyUb(s). In AOTI, PE(s) comprise linkers (MSLs, FLs, or MSFLs), SCSs (e.g., 2a sites), or CT. In aspects, OSMA of the Ags of an IV Ag CEP are contained in gDAgFPs.

[0876] In aspects, IV Ags of a CEP comprise MHCIE(s), MHCIIE(s), or both, in aspects resulting in DOS CTL IR(s), TH IR(s), and BC IR(s). In aspects, CEP(s) comprise FVs in which BCE(s) are removed or lacks any known IV BCEs. In aspects, the CEP comprises IV BCE(s). In aspects, the CEP comprises DIV AgV(s). In aspects, the CEP comprises a mixture of immunodominant/IRV AVg(s) and subdominant Ag(s). In aspects, a CEP comprises cryptic IV Ag(s).

[0877] In aspects, an IV Ag CEP comprises TCE(s) against an internal IV protein, external IV protein, or both. In aspects, an IV Ag CEP comprises MHCIE(s) and MHCIIE(s) against an external IV protein, an internal IV protein, or both. In aspects, a CEP comprises a combination of two, three, or all four of such types of Ags. In aspects, a CEP comprises five or more of such Ags (e.g., 6, 8, 10, 12, 14, 16, or 20 such Ags) in two, three, four of such groupings. Examples of internal and external IV T cell epitopes are exemplified in, e.g., Savic M et al. Immunology. 2016; 147(2):165-177. doi:10.1111/imm.12548.

[0878] In aspects, an IV Ag CEP comprises unnatural immunity Ag(s) (SFE Scorza et al. Vaccine. 2016; 34(26):2926-2933. doi:10.1016/j.vaccine.2016.03.085 and Nabel, supra). Other pathogen Ag(s) DEH or KITA and ATAOTI also can comprise unnatural immunity Ag(s).

[0879] In aspects, IV Ag(s) comprise IV serotype/strain cross-reactive epitopes. Examples of such epitopes are described in, e.g., Koutsakos M et al. Nat Immunol. 2019; 20(5):613-625. doi:10.1038/s41590-019-0320-6. In aspects, a cross-protective IV Ag EP comprises HA stalk Ag(s) or AgV(s).

[0880] In aspects, IV Ags comprise IV Ags from IV strains that are predominately from different regions, such as different continents (e.g., Asia, N. America, or Europe) or different hemispheres (Northern and Southern or Eastern or Western). In aspects, IV Ags comprise one or more Ags in the Influenza Sequence and Epitope Database (ISED) (SFE Yang I S, et al. Nucleic Acids Res. 2009; 37.D423-D430. doi:10.1093/nar/gkn881 and http://influenza.cdc.go.kr/search/em.mdr.

[0881] In aspects, OSMGAOA of any HA IV Ag(s) of a CEP are at least partially glycosylated. In aspects, IV HA AgV(s) comprising GSRV(s) are provided, wherein OSMA of the N-linked glycosylation sites are removed. In aspects, an HA IV Ag is from a H1, H3, or H5 IV. NLG sites of HA PPTs are exemplified in, e.g., Kim J et al. Yonsei Med J. 2012; 53(5):886-893. doi:10.3349/ymj.2012.53.5.886. In aspects, IV Ag(s) comprise a glycosylated or partially glycosylated IV M2 PPT/AARS. In aspects, IV Ag(S) comprise M2 AgV(s) comprising GSRV(s). NLG sites of M2 PPTs are exemplified in e.g., Holsinger L J et al. J Virol. 1994; 68(3):1551-1563.

[0882] In aspects, an IV CEP comprises HA stalk domain (“SD”); matrix protein 1 (M1), matrix protein 2 (M2), or M2e (M2 epitope) Ags; or combinations. In aspects, an IV CEP also comprises IV nucleoprotein (NP) Ag(s) or AgV(s) (e.g., NP Ag(s) and M1 Ag(s); HA SD Ag(s) and M2 Ag(s); or HA SD, M1, M2, and NP Ag(s)). In aspects, a CEP will further comprise a neuraminidase (N) (N1 or N2) Ag. However, in other aspects, a CEP lacks any N Ag(s). In aspects, 2+ such Ag(s), 2+ portions of 1+ of such Ag(s), or both are from different types of IVs. In aspects, one type of such IV Ag is a chimera of HA1 and HA2 sequences, such as a HA1 SD and a HA2 HA head domain Ag (or vice versa). In an aspect, the CEP comprises a combination of 2, 3, or 4+HA Ag(s) comprising HA SD Ag(s), NP Ag(s) (e.g., AgV(s)), M1 Ag(s), and M2 Ag(s), comprising MHCIE(s) & MHCIIE(s), and optionally comprising ITS(s), e.g., polyUb(s). In aspects, IV Ag(s) comprise HA stalk domain AARS(s) Ag(s)/AgV(s); HA head domain AARS(s) Ag(s)/AgV(s), neuraminidase (N) stalk domain Ag(s)/AgV(s), or N head domain Ag(s)/AgV(s). An exemplary HA stalk domain Ag is described in Mallajosyula et al. PNAS (2014) E2514-E2523. IV Ags can PC, GCO, SCO, consist essentially of, or CO such domains, such as being “headless” sequences, soluble HA Ag sequences, and the like.

[0883] In AOTI, IV Ag CEPs comprise anti-IV Ab AARS(s) directed to any suitable IV Ag. Examples of such Abs are KITA (SFE US20190062407 and WO202004154). In aspects, such anti-IV Ab sequences form part of a NGDFP. In AOTI, NGDFP(s) comprises IV Ag(s), and optionally ITS(s) (e.g., polyUb(s)).

[0884] In aspects, the CEP comprises AgV(s), such as editopes, GSRAGV(s), DIV AgV(s), synthetic AgV(s) developed through mutagenesis or directed evolution (see, e.g, AU2002027676), chimeric AgV(s) (e.g., AgV(s) comprising IV Ag AARS(s) of strains of risk of cross-species transmission), and AgV(s) developed from consensus sequences of IV Ags. In an aspect, a HA loop-forming sequence, such as KRRSNKS (SEQ ID NO:733), is substituted with a GSRV or other variant (e.g., a string of two to eight Gly residues). In aspects, a HA AgV comprises a modification that disrupts a site B helix, formed by, e.g., SEQ ID NOs:670 & 671. In aspects, such modifications introduce a glycosylation site, by, e.g., using NAS to replace QIS; substituting NIT for SLY; substituting NST for KYK; or substituting NTS for YKY at 159. CD4 IV Ags include SEQ ID NOs:672-676 (or FFs/FVs). Known CD8 IV epitopes include SEQ ID NOs:677-680 (& FFs/FVs). Examples of known H1N1 epitopes include SEQ ID NOs:681-683 (& FFs/FVs). Additional IV epitopes include SEQ ID NOs:684-691 & FFs/FVs thereof. In aspects, IV CEPs lack epitopes that exhibit a prevalence of more than about 40%, 50%, 60%, 70%, or 80% but exhibit serotype coverage of less than about 15%, 20%:5, or 25%5 (such principles can be applied to other viral Ag CEPESCs OTI). In aspects, CEPs comprise CD8 IV epitope(s) identified with the top 25%, 33%, or 50% of IFNg, IL-2, or TNFalpha CD4TC counts, CD8 TC counts, or both in TR(s), e.g., as reported in https://www.ncbi.nlm.nih.gov/pmc/articles/PMC4717245/bin/IMM-147-165-s001.docx (Savic et al, supra).

[0885] In aspects, a CIV Ag CEP comprises ICSTAP(s)/ICITM(s) such as an EAT-2 PPT, SAP PPT, or CT. In aspects, an IV AgES CEP comprises gDS CI(s). In aspects, EP comprise NGDCI(s), e.g., a PD-1/PD-L1 CI or CD112R CI.

[0886] In aspects, IV Ag(s) are associated with ITS(s), e.g., PTPS(s), e.g., polyUb(s). In aspects, OSMA of IV Ag(s) are contained in gDAgFP(s) in CEPs.

[0887] In AOTI, CEPES(s) are contained in 2+ NAMs comprising different EPES(s), 1+ of the EPs comprising gDAgFP(s) and a 2^{nd} NAM EP comprising a 2nd gDP, ICSTAP(s)/ICITM(s), NCMIP(s), Ag(s), NGDICRTSAgFPs, or CT.

[0888] In aspects, CIV AgES EPECS(s) are contained in viral vectors, such as an Ad vector, MMLV vector, etc. As with any other viral Ag aspects, In AOTI, such CIV AgES EPEC(s) can be delivered in a non-pathogenic viral vector derived from the DCA or a related virus (i.e., an IV vector). In aspects, CIV AgES CEPES(s) are contained in nucleic acid vectors. In aspects, the CEPNAMs comprise EEI(s). In aspects, the vectors are mRNA vectors. In aspects, the vectors are plasmid DNA vectors associated with a TFA, such as a CaPNP.

[0889] In aspects, CaPNP(s) of a CaPNP-associated NAV CEPESC exhibit DOS higher hemagglutination inhibition, virus neutralization, anti-IV IgG antibody titers, or CT, than without the CaPNP(s). In aspects, such CEPESCs are administered by mucosal administration, e.g., in NHA TR(s) (e.g. pulmonary, intranasal, intravaginal, or CTs). Such aspects apply to any CaPNP-plasmid aspects of this disclosure and are not limited to IV AgES CEPESCs.

[0890] In aspects, delivering an EA of a CEPESC comprising IV AgES(s) induces IR(s) against one or more IV(s). In aspects delivering an EA of a CEPESC comprising IV AgES(s) induces DOS CE(s) relating to IV infection, such as DOS reduction in viral shedding, DOS reduction in viremia, or DOS reduction in IV-related nucleic acids in the host. In aspects, an EA of CEPESC comprising IV AgES(s) results in a DOS reduction in IV infection when initially administered more than 48 hours after infection. In aspects, administration of an EA of a CEPESC comprising IV AgES(s) results in a DOS reduction in one or more IV infection-associated symptoms, such as dry cough, fever, chills, myalgias progressing to respiratory failure, and secondary bacterial infections (e.g., MRSA). In aspects, a single administration of an EA of a CEPESC comprising IV AgES(s) provides protection in a significant proportion of a population for an entire flu season or multiple seasons. In aspects, a IV AgES CEPESC induces a DOS improved immunological memory in one or more aspects as compared to one or more IV vaccines in the prior art, such as OSMA of the on-market IV vaccines (e.g., Fluarix, Fluarix Quadrivalent, FluLaval, Fluzone, or Fluzone Quadrivalent (for HSIV); Nobivac® for CIV; or Ingelvac Provenza™ for SIV. In aspects, the method results in a significant IR against IV in about 14 days or less, about 10 days or less, or about 7 days or less. In aspects, inducing anti-IFV IRs by delivering IV AgES CEPESCs comprises administering a booster dose after e.g., 2-4 weeks, 2 months, 3 months, 6 months, or 1, 2, 3, 5, or 10 years (e.g., 2-52 weeks, 1-36 months, or 1-5 years). In aspects, an IV AgES CEPESC is administered in a CC comprising an anti-IV vaccine or an anti-IV therapeutic. In aspects, an IV AgES CEPESC is administered in association with an anti-IV vaccine or anti-IV therapy. In AOTI, such methods DOS B cell & T cell IRs.

[0891] IVs are extensively studies and numerous IV Ags, epitopes, and related compositions and techniques are KITA. Examples of references with disclosures ATAOTI are U.S. Ser. No. 10/022,435, U.S. Pat. No. 8,470,771, U.S. Ser. No. 10/543,268, U.S. Ser. No. 10/596,250, U.S. Ser. No. 10/584,148, U.S. Ser. No. 10/286,061, US2016020796, US20190275137, US20190321460, US20190134185, US20150086560, US20190201519, WO2016205347, WO2016178811, Gutierrez A H et al. Influenza Other Respir Viruses. 2017; 11(6):531-542. doi:10.1111/irv.12513; and Rimmelzwaan G F et al. Vaccine. 2009; 27(45):6363-6365. doi:10.1016/j.vaccine.2009.01.016.

[0892] In aspects, an IV AgES CEPESC comprises IV Ag(s) of an IV(s) primarily infects NHAs. In aspects, SMGAOA IV Ag(s) of a CEP are Ags of NHA IVs. In AOTI, OSMA of the IV Ags of an EP are CIV Ags. In aspects, a CEP comprises H3N2 CIV Ag(s), H3N8 CIV Ag(s), or CT. In aspects, CEPs comprise MHCIE(s) & MCHIIE(s) against H3N2 or H3N8 or both, or either or both in combination with Ags of/related to PPTs of H1N1, H5N1, H3N1, or CT. In aspects, delivery of an EA of such a CEPESC DOS reduces indicators of CIV in TR(s), such as viral shedding; symptoms of CIV, such as cough, runny nose, fever, lethargy, eye discharge and reduced appetite; or both. In aspects, such a product is delivered to canines with no capability to mount DOS IR(s) to one or more strains of CIV associated with OSMA of the CIV Ag(s) in the EP.

[0893] In AOTI, CEPESCs express IV Ag(s) AW commercial poultry, dogs, or both. In aspects, such CEPESCs comprise AgES(s) encoding H7N2 IV Ag(s).

[0894] In AOTI, CEPESCs expressing IV Ag(s) exhibit DOS IR(s) on challenge with IV(s) after at least ˜6 months, ≥12 months, ≥18 months, ≥˜2 years, ≥˜3 years, or at least about 5 years. In aspects, treated TRs comprise a DOS amount of Ag-specific T memory cells associated with Ag(s) in the EP.

[0895] In aspects, a CIV AgES CEP comprises a gDS CI. In aspects, an EP also comprises a NGDCI, such as a PD-1 CI, PD-L1 CI, or a CD112R CI.

[0896] In aspects, CIV Ags are associated with ITS(s), such as PTPS(s), e.g., polyUb(s). In aspects, OSMGAOA of such CIV Ags in gDAgFP(s) in the EP. In AOTI, CIV Ag CEPs comprise ICSTAP(s)/ITICITM(s) e.g., EAT-2 PPT(s).

[0897] In aspects, an IV AgES CEP comprises a gDS CI. In aspects, an EP also comprises a NGDCI, such as a PD-1 CI, PD-L1 CI, or a CD112R CI.

[0898] In AOTI, CIV AgES NAM(s) are NAV(s). In aspects, NAV(s) are mRNA vectors. In aspects, NAV(s) are plasmid DNA vectors associated with a TFA, such as a CaPNP. In aspects, CEPESC NAM(s) comprise EEI(s).

[0899] In aspects, CIV AgES CEPES(s) are contained in 2+ NAM(s) comprising different EPESs, at least one of the EPs comprising gDAgFP(s) and a 2nd EP comprising a different gDP, ICSTAP(s), NCI CIV Ag(s), NGDICRTSAgFPs, or combinations.

[0900] In aspects, a CIV Ag EP will comprise CIV HA SD Ag(s), NP Ag(s), M1 Ag(s), M2 Ag(s), or a combination of two, three, or all four thereof (e.g., HA SD/NP/M1/M2 or NP/M1/M2). In aspects, such Ag(s) will comprise MHCI and MHCII Ags. In aspects, OSMA of such CIV Ag(s) are in gDAgFP(s) of the CEP. In aspects, OSMA of such Ag(s) are associated with ITS(s), such as polyUb(s). In aspects, the CEP comprises an ITII, such as an EAT-2 PPT. In aspects, the EPs comprise one or more 2A sites, MSLs, FLs, or combinations. In aspects, an EA of any such CEPESC exhibits DOS IR(s) or CE(s) as compared to administration of Nobivac® Canine Flu Bivalent Vaccine. In aspects, delivery of an EA of any such CEPESC results in a DOS increase in IFNgamma in TRs.

### 5) Pseudorabies Virus

[0901] In aspects, CEPs comprise pseudorabies virus (PRV) Ag(s). PRV is an alphaherpesvirus and is aka as suid herpesvirus 1 (SuHV1) and Aujeszky's disease virus (ADV)(in reference to a disorder caused by PRV). PRV is interspecies transmissible/zoontic, being indicated infections of other animals such as cows and horses, and recently shown to have infect humans. SFE Yang X et al. Int J Infect Dis. 2019; 87:92-99. doi:10.1016/j.ijid.2019.08.007.

[0902] PRV AgES CEPESCs can comprise PRV Ag AgES(s) encoding any suitable types of PRV Ag(s) from any suitable type of PRV & PRV PPTs. Numerous PRV strains are KITA. SFE Zhai X et al. Virol Sin. 2019; 34(6):601-609. doi:10.1007/s12250-019-00140-1; Verpoest S et al. 2014; 172(1-2):72-77. doi:10.1016/j.vetmic.2014.05.001; Tong W et al. Vet Microbiol. 2015; 181(3-4):236-240. doi:10.1016/j.vetmic.2015.09.021; Tang Y D et al. Sci Rep. 2017; 7(1):7783. doi:10.1038/s41598-017-08269-3; Yu X et al. Emerg Infect Dis. 2014; 20(1):102-104. doi:10.3201/eid2001.130531; Wu R et al. J Vet Sci. 2013; 14(3):363-365. doi:10.4142/jvs.2013.14.3.363; and Sun Y et al. PeerJ. 2018; 6:e5785. doi:10.7717/peerj.5785. CEPs can comprise PRV Ag(s) from or related to any Ag(s) of such strains or other PRV strain(s).

[0903] PRV Ag(s) in CEP(s) can include PRV Ag(s) of or that are related to any suitable PRV PPTs. In aspects, PRV Ag(s) in CEP(s) comprise PRV gB Ag(s), PRV gC Ag(s), PRV gD Ag(s), PRV gE Ag(s) or combinations. In aspects, CEP(s) do not comprise any PRV gD Ag(s). In aspects, PRV gDS(s) in CEP(s) are used to induce gDS functions, such as porcine nectin-1 receptor (e.g., in a PRV gDS or PRV gD-related gDS gDAgFP(s) in the CEP). In aspects, such PRV gDS(s) or PRV-related gDS(s) are the only gDS(s) in the CEP. PRV Ag(s) can include other suitable PRV PPT(s) or AARS(s). Such PPT(s)/AARS(s) and additional relevant aspects of PRV biology that can be adapted or applied to methods/compositions of related aspects of the invention are described in, e.g., Klupp B G et al. J Virol. 2004 February; 78(4):2166 and J Virol. 2004; 78(1):424-440. doi:10.1128/jvi.78.1.424-440.2004; Ye C et al. Virol J. 2018; 15(1):195. Published 2018 Dec. 29. doi:10.1186/s12985-018-1102-8; Pomeranz et al. Microbiol Mol Biol Rev. 2005; 69(3):462-500. doi:10.1128/MMBR.69.3.462-500.2005; Chinsakchai S et al. 1994; 43(1-3):107-116. doi:10.1016/0165-2427(94)90126-0; Stegeman A, et al. Vet Q. 1997; 19(3):117-122. doi:10.1080/01652176.1997.9694754; and Pomeranz L E et al. Microbiol Mol Biol Rev. 2005; 69(3):462-500. doi:10.1128/MMBR.69.3.462-500.2005.

[0904] In aspects, PRV Ag CEP(s) comprise TCE(s). In aspects, PRV Ag CEP(s) comprise MHCIE(s) & MHCIIE(s). In aspects, PRV gC TCE(s) are VRHRSIOI to 1 or both of SEQ ID NOs:692 & 693.

[0905] In aspects, a PRV-related EP comprises PRV PCRA(s).

[0906] In aspects, PRV Ag CEP(s) comprise PRV BCE(s). Examples of PRV BCE(s), BC Ag(s), and PRV Ab(s) are KITA and ATAOTI. SFE Zhang P et al. Vet Microbiol. 2019; 234:83-91. doi:10.1016/j.vetmic.2019.05.013; Zaripov M M et al. J Gen Virol 1999 August; 80(Pt 8):2285 and J Gen Virol. 1999; 80 (Pt 3):537-541. doi:10.1099/0022-1317-80-3-537; Jacobs L et al. J Gen Virol. 1990; 71(Pt 4):881-887. doi:10.1099/0022-1317-71-4-881; Jacobs L et al. Clin Diagn Lab Immunol. 1994; 1(5):500-505; Li X et al. PLOS Pathogens 13(12): e1006777. https://doi.org/10.1371/journal.ppat.1006777; Morenkov O S et al. Virus Res. 1997; 51(1):65-79. doi:10.1016/s0168-1702(97)00077-4; Coe N E et al. Arch Virol. 1990; 110(1-2):137-142. doi:10.1007/BF01310710; and Xu J J et al. Biochem Biophys Res Commun. 2019; 519(2):330-336. doi:10.1016/j.bbrc.2019.08.168. In aspects, Abs or Ab AARS(s) from such Ab(s) are also within the CEP. E.g., such Ab AARS(s) can be incorporated into FPs comprising one or more PRV Ag(s) in a CEP or in or expressed by a composition administered in association with PRV Ag CEPESC(s). Additional PRV Ags and related PMCs ATAOTI comprising PRV AgES CEPESC(s) are described in, e.g., U.S. Pat. No. 5,449,765; CN107163108; and CN104628865.

[0907] In aspects, PRV Ag CEPs comprise PRV AgV(s). In aspects, AgV(s) comprise GSRV(s) or DIVs. In aspects, PRV AgV(s) include editope(s) (e.g., improved MHC affinity AgV(s)).

[0908] In aspects, PRV Ag(s) are associated with ITS(s). In aspects, ITS(s) in the CEP comprise PTPS(s). In aspects, PTPS(s) comprise polyUb(s).

[0909] In aspects, a PRV CEP comprises ICSTAP(s)/ITICITM(s). In aspects, ICSTAP(s) comprise EAT-2 PPT(s). In methods, ICITSTAP(s) or ES(s) are AAW delivery of PRV AgES CEPESC(s), e.g., prior to initial CEPESC dosing.

[0910] In aspects, PRV CEP comprises NGDCI(s). In aspects, NGDCI(s) include PD-1, PD-1, or CD112R CI(s). In aspects, NGDCI(s) are non-Ab multimeric PPT, such as a trap PPT. In methods, NGDCI(s) are AAW or expressed from NAM(s) delivered in association with PRV AgES CEPESC(s).

[0911] In aspects, PRV CEPs comprise NCMIMP(s), such as cytokine(s), e.g., IFNgamma. In aspects here and WRT to other methods herein SMGAOA NCMIMP(s) are not ICSTAP(s) or ITICITM(s). In other aspects NCMIMP(s) ACA ICSTAP(s)/ITICIMP(s). In methods, NCMIMP(s) are administered or related ES(s) delivered in AW the delivery of an EA of PRV AgES CEPESC(s).

[0912] In aspects, CEPs comprise PIM(s) that DOS (a) upregulates an NKG2D ligand (e.g., MULT-1, H60, or RAE-1E); (b) reduces NKG2D inhibition; (c) enhances NKG2D activity; or (d) upregulates NKG2D expression. Aspects can include other modulator(s) of NKG2D activity, NKG2D activity inhibitor(s).

[0913] In aspects, OSMGAOA of PRV Ag(s) of a CEP are contained in gDAgFP(s). In aspects, OSMGAOA of PRV Ag(s) of a CEP are contained in other FP(s), such as PE FP(s), Ag:ITS FP(s), FP(s) comprising NGDICRTS(s), or CT.

[0914] In aspects, PRV Ag CEsP comprise 2+ gDPs. In AOTI, PRV Ag CEPs comprise multiple gDAgFP(s). In AOTI, PRV Ag CEP(s) comprise mGDS(s).

[0915] In aspects, a PRV Ag CEP comprises gDAgFP(s) comprising gDS(s) that exhibit a higher level of relatedness, similarity, or both to a PRV gD than a human alphaherpesvirus gD. In aspects, gDAgFP(s) comprise a gDS that is RVRHRSI, SVSHSSCE, or both to ≥1 of SEQ ID NOs:694-696. In aspects, gDS(s) comprise gDS(s) that bind porcine nectin-1 with suitable, comparable, or improved affinity as compared to WT PRV gD, HSV-1 gD, HSV-2 gD, or CT. pNectin-1 binding is described in, e.g., Li A et al. PLoS Pathog. 2017; 13(5):e1006314. doi:10.1371/journal.ppat.1006314 and Zago A et al. PNAS 2004; 101(50):17498-17503. doi:10.1073/pnas.0408186101).

[0916] In aspects, PRV Ag EPES(s) comprise EEI(s), e.g., CMV Intron A.

[0917] In aspects, PRV Ag EPES(s) are contained in NAV(s). In aspects, EPES(s) are contained in viral vector(s), e.g., viral vectors with high transfection rates in 2+ types of TR(s) (e.g., Ad5 vectors for humans and pigs). In aspects, PRV Ag EPES(s) are delivered in a PRV-derived vector (such vectors are described in, e.g., Tan F et al. Methods Mol Biol. 2017; 1581:79-96. doi:10.1007/978-1-4939-6869-5_5). In aspects, OSMA of the vectors are NAV(s). In aspects, NAV(s) comprise mRNA vector(s). In aspects, OSMA of the vectors are TFA-associated vectors, such as CaPNP-associated plasmids.

[0918] In aspects, PRV AgES CEPESC(s) are combined in CC(s) or administered in association with anti-PRV therapeutics, anti-PRV vaccines, or both. Examples of PRV vaccines are described in, e.g., Freuling C M et al. Vaccines against pseudorabies virus (PrV). Vet Microbiol. 2017; 206:3-9. doi:10.1016/j.vetmic.2016.11.019. Examples of CCCs used in viral infections, such as PRV infections, include delivery of EA(s) of immunoglobulin, glucocorticoids, antiviral agents, and symptomatic supportive treatments.

[0919] In aspects, a PRV AgES CEPESC induces IR(s) in TR(s). In aspects, such IR(s) comprise DOS modulation of NKC activity, such as DOS enhanced MHCII expression, DOS increases in NKC co-stimulatory molecule expression (e.g., CD80/86 expression), or both; DOS enhanced NKC cytotoxicity; or DOS enhanced NKC cytokine production. In aspects, IR(s) comprise DOS proliferation of PRV Ag-specific T cells, such as CD4, CD8, or both CD4 & CD8 T cells. In aspects, IR(s) comprise DOS proliferation of PRV Ag-specific memory T cells. In aspects, IR(s) comprise DOS killing of PRV-infected cells, a reduction in PRV-associated nucleic acids in TR cells/serum, or both. In aspects, IR(s) comprise reduced PRV shedding, reduced PRV Ag in serum/TRs, or both

[0920] In aspects, a PRV AgES CEPESC induces DOS anti-PRV CE(s). In aspects, CE(s) include DOS reduction in PRV-associated pregnancy failures (abortions, stillbirths, etc.) or reduced pregnancy/fertility (live offspring) rates. In aspects, CE(s) comprise DOS reduction in fever, coughing, sneezing, anorexia, excess salivation, seizures, constipation, depression, ataxia, circling, pneumonia, and respiratory failure/issues. In aspects, CE(s) comprise reduction in lesions (e.g., gross of focal hepatic, pulmonary, and splenic necrosis and necrotic tonsillitis or reduction of lesions/microscopic lesion in the nervous system). In aspects, CE(s) include reduced meningoencephalitis, ganglioneuritis, and perivascular cuffing by mononuclear cells. In aspects, CE(s) comprise increased piglet survival rates. In aspects, CEPESC(s) are delivered to pigs under 2 months, 6 weeks, or 1 month in age.

### 6) ASFV (African Swine Fever Virus)

[0921] In aspects, CEP(s) comprise Ag(s) of or related to African Swine Fever Virus (ASFV). An ASFV Ag CEP can comprise any suitable number of any suitable type of ASFV Ag(s) (e.g., 1, 2, 3, 5, 7, 8, 10, 12, 15, or more ASFV Ag(s)). ASFV Ag(s) can be from any type of ASFV, such as any of ASFV serotypes 1-8, any of the 24 currently known ASFV genotypes, or comprising AARSs encoded by any of the 39 ASFV strains in GenBank, or combinations (SFE Malogolovkin A et al. Emerg Infect Dis. 2015; 21(2):312-315. doi:10.3201/eid2102.140649 and https://wwwnc.cdc.gov/eid/article/21/2/14-0649-t1 and Gaudreault N N et al. Vaccines (Basel). 2019; 7(2):56. Published 2019 Jun. 25. doi:10.3390/vaccines7020056). ASFV Ag(s) can include Ag(s) from any of the currently known 68 ASFV structural proteins, or approximately 80 nonstructural proteins. In aspects, a CEP comprises ASFV Ag(s) that are cross-protective against two or more types of ASFV, such as two or more ASFV strains within a serotype. ASFV Ag(s) also can be from or be related to any Ag of any of the ASFV strains maintained at the National Research Institute for Veterinary Virology and Microbiology (VNIIVViM) in Pokrov, Russia, many of which are publicly available (SFE Malogolovkin A et al. Emerg Infect Dis. 2015; 21(2):312-315. doi:10.3201/eid2102.140649). In aspects, ASFV Ags of a CEP are encoded by ASFV early genes, intermediate genes, late genes, or two or all thereof. Additional ASFV strains, proteins, etc., ATAOTI are described in e.g., Alejo A. et al. J Virol 92:e01293-18. https://doi.org/10.1128/JVI.01293-18.; Almazon F. et al. 1992. J Virol. November; 66(11):6655-67 PMID:1404609; de Villers E. et al. doi:10.1016/j.virol.2010.01.019, 2010. Virology 400 (2010) 128-136; Gonzales A. et al. 1990 J. Virol 64(5):2073-2081 PMCID: PMC249363; Yanez R. et al. 1995. Virology. 1995 Apr. 1; 208(1):249-78. DOI: 10.1006/viro.1995.1149; Dixon L K et al. Virus Res. 2013; 173(1):3-14. doi:10.1016/j.virusres.2012.10.020; and Farlow J et al. Virol J. 2018; 15(1):190. Published 2018 Dec. 14. doi:10.1186/s12985-018-1099-z.

[0922] In aspects, ASFV Ag(s) comprise TCE(s). In aspects, ASFV Ag(s) comprise MHCIE(s) and MHCIIE(s). In aspects, ASFV Ag(s) comprise BCE(s). In aspects, an ASFV Ag CEP lacks any known ASFV BCE(s). In aspects, ASFV MHCIE(s) and MHCIIE(s) in a CEP DOS BC IR(s). In aspects, ASFV Ag(s) are associated with ITS(s), such as PTPS(s), e.g., polyUb(s). In aspects, ASFV Ag CEP(s) comprise PEs in which OSMA of the PE Ags are ASFV Ags.

[0923] In aspects, ASFV Ag(s) comprise Ag(s) from the proline-rich cytoplasmic domain of CD2v; from regions I and II located within the carboxyl-terminal regions of the C-type lectin protein; or both. Examples of such epitopes include SFLNLTKLYHHHSHY (SEQ ID NO:734); KYNLNRKKSHYTDLL (SEQ ID NO:735), NRKKSHYTDLLFICS (SEQ ID NO:736), SPPPKPCPPPKPCPP (SEQ ID NO:737), and KPCPPPKPCPPPKPC (SEQ ID NO:738) (see, Burmakina et al. J Gen Virol. 2019; 100(2):259-265. doi:10.1099/jgv.0.001195).

[0924] BCE(s) and anti-ASFV Abs that can be incorporated, modified, or ATAOTI include A151R, B438L, and K205R-A104R (Lokhandwala S et al. PLoS One. 2017; 12(5):e0177007. doi:10.1371/journal.pone.0177007). In aspects, an ASFV Ag CEP comprises anti-ASFV Abs or Ab AARSs, e.g., in NGD FPs comprising anti-ASFV Ab AARSs and ASFV Ags.

[0925] In aspects, ASFV Ag(s) are from p49, p72, p30, pp 62, p56, p54, j18L, CD2v, p22, p12, or combinations. In aspects, OSMA ASFV Ag(s) of a CEP are from envelope proteins. In aspects, ASFV Ag(s) comprise Ag(s) of 9GL, p72, ASFV C-type lectin, ASFV helicase, ASFV DNA Pol, KP362L, ASFV DNA ligase, ASFV RNA Pol, A104R, EP364R, F317L, or combinations. In aspects, ASFV Ag(s) comprise p30 AARS(s). In aspects, AASF Ag(s) comprise p54 and p30 Ag(s). In aspects, ASFV Ag(s) in a CEP are limited to three types of ASFV Ag(s) or less, such as two types of ASFV Ag(s). In aspects, a CEP lacks ASFV Ag(s) p72, p22, or both. In aspects, ASFV Ag(s) in a CEP comprise A104R, A151R, B119L, B602L, CD2v, K205R, P49 P12, P32, P54, P72, P30/P32, P220, or combinations. In aspects, ASFV Ag(s) of a CEP comprise Ag(s) of CP204L, PK205R, PB602L, CP530R, E183L, PB646L, and combinations. In aspects, an ASFV Ag CEP comprises PE(s) comprising OSMA ASFV Ags, such as P32-CD2V-I329L-G6L. More exemplary combinations include CP204L+CP530R, PK205R+E183L, PB602L+PB646L, CP204L+PK205R+PB602L, pp 220 (P150-P37-P14-P34), and CP204L+PK205R+CP530R. In aspects, ASFV Ag(s) comprise P11 or P11.5 Ags (e.g., PEERCTYKFNSYTKKMEL (SEQ ID NO:739) and DQEEKKALQNKETKNLGIP (SEQ ID NO:740), respectively). Additional ASFV Ag(s) can comprise Ag(s) from pp 62/p62, EP153R, NP1450L, NP419L, MGF405-4R, and MGF360-11L. In aspects, ASFV Ag(s) comprise A151R, CP312R, E146L, E184L, MGF110 type protein Ags, and combinations. Additional ASFV Ags, epitopes, and the like that can be incorporated or adapted for use in CEPESCs are described in, e.g., US20080131449; CN110218732; CN110269932; CN110093356; CN109836478; WO202006040; RU2534343; CN110618279; Netherton C L et al. Front Immunol. 2019; 10:1318. doi:10.3389/fimmu.2019.01318; Gaudreault N N, et al. Vaccines (Basel). 2019; 7(2):56. Published 2019 Jun. 25. doi:10.3390/vaccines7020056 and https://www.ncbi.nlm.nih.gov/pmc/articles/PMC6593957/bin/Data_Sheet_1.PD F; and Argilaguet J M et al. PLoS One. 2012; 7(9):e40942. doi:10.1371/journal.pone.0040942

[0926] In aspects, an ASFV Ag CEP comprises a sequence that is RVRHRSII to SEQ ID NO:697. In aspects, an ASFV Ag CEP comprises PCRA(s) or CRA(s). Application of ELI to ASFV AARS(s) that can be adapted to testing, identification, or confirmation of CRAs is described in, e.g., Jenson J. et al. PMID: 10986387 and Lacasta A. et al. 2014. Journal of Virology 88(22)13322-13332 DOI:10.1128/JVI.01893-14.

[0927] In aspects, OSMGAOA ASFV Ag(s) are AW ITS(s). In aspects OSMA ITS(s) are PTPS(s), e.g., polyUb(s). In aspects, ASFV Ag(s) are in PE(s) comprising MSL(s), FL(s), MSFL(s), or SCS(s). In aspects, OSMOA ITS(s) are non-PTPS ITS(s), e.g., ERTPS(s) or exosome ITS(s).

[0928] In aspects, an ASFV Ag CEP comprises ASFV AgV(s). In an aspect, ASFV AgV(s) comprises consensus sequence Ags (e.g., developed from consensus of ASFV CRA(s), such as immediate, early, or late ASFV CRA(s)). In aspects, ASFV AgV(s) comprise GSRAGV(s). In aspects, an ASFV Ag CEP comprises a sequence RVRHRSIOI to ≥1 of SEQ ID NOs:26-28.

[0929] In aspects, ASFV Ag(s) comprise EP402R Ag(s), E248R Ag(s), or both, or FV(s) of one or both thereof (e.g., a GSRAgV). Such PPTs are described in, e.g., Karger A, et al. Viruses. 2019; 11(9):864. doi:10.3390/v11090864 & Alonso, C. et al. 2018, J. General Virology, 99: 613-614 & https://talk.ictvonline.org/ictv-reports/ictv_online_report/dsdna-viruses/w/asfarviridae#Citation (& Uniprot Refs. Q65200, Q6JHU1, & Q89501).

[0930] In aspects, CEP(s) comprise EP240R FV(s) comprising GSRV(s) in the potential NLG sites starting at residue 12, residue 55, residue 75, residue 113, residue 143, or combinations, e.g., the leading N residue being replaced by a D residue. In aspects, CEP(s) comprise EP420R FV(s) comprising GSRV(s) in potential NLG sites starting at residue 25, residue 37, residue 52, residue 55, residue 72, residue 77, residue 81, residue 89, residue 95, residue 108, residue 125, residue 137, residue 148, residue 155, residue 151, residue 363, or combinations, e.g., the leading N residue being replaced by a D residue.

[0931] In aspects, an ASFV Ag comprises E248R Ag(s) and 402R Ag(s) (which for clarity's sake can be AgV(s) of either/both thereof). In aspects, the EP402R and E248R Ag(s) are separated by linkers (e.g., MSLs, FLs, or MSFLs), SCS(s) (e.g., 2A site(s)), or both. In aspects, OSMA of the EP402R/E248R Ags are associated with ITS(s), e.g., PTPS(s), e.g., Ub(s) e.g., SEQ ID NO:1.

[0932] In aspects, ASFV Ag CEP(s) comprise ITII(s). In aspects, ITII(s) comprise EAT-2 AARS(s). In aspects, AASF Ag CEP(s) comprise NGDCI(s), such as PD-L1 CI(s) or CD112R CI(s). In aspects, OSMA NGDCI(s) in a CEP lack Ag sequences, are multimeric or both, as in the case of trap proteins. In aspects, ASFV Ag CEP(s) comprise NANCIPIs, such as IFNg.

[0933] In aspects, ASFV AgES EPESNAM(s) comprise EEI(s), ISNS(s), or both. In aspects, a CEPESC comprises two or more NAMs comprising different EPESs, such as ESs encoding different gDP(s), a gDAgFP and a NGDICRTSFP, a gDAgFP and an ITII, and the like. In aspects, NAM(s) are NAV(s), such as mRNAs or plasmid DNA(s). In aspects, NAV(s) are associated with TFA(s), such as CaPNP(s). In aspects, EPES(s) comprise SCUP(s).

[0934] In AOTI, ASFV Ag gDAgFP(s) comprise gDS(s) RHRVRSII to gDS(s) of a human HSV or PRV. In AOTI gDS(s) comprise MgDS(s). In AOTI, CEPs comprise gDSS(s) RVRHRSII to a WT gDSS of an HSV or PRV. In AOTI, OSMA ASFV Ags in gDAgFP(s) are downstream of any gDS(s) therein. In aspects, gDP(s) of a CEP lack a gDTMD. gDP(s) can lack or comprise gD PFD(s).

[0935] In aspects, EPES(s) comprising ASFV AgES(s) comprise NASM(s). In aspects, NASM(s) comprise a FabI gene sequence/triclosan NASM.

[0936] In aspects, an ASFV AgES CEPESC comprises another anti-ASFV vaccine or therapeutic. In aspects, an ASFV AgES CEPESC is administered in association with another anti-ASFV vaccine or therapeutic, such as an attenuated ASFV. Examples of such CCC(s) are described in, e.g., Lacasta A. et al. 2015. Vet Res (2015) 46:135 DOI 10.1186/s13567-015-0275-z; U.S. Ser. No. 10/507,237; US20150165018A1; and Pérez-Núñez D et al. Vet Immunol Immunopathol. 2019; 208:34-43. doi:10.1016/j.vetimm.2018.11.018.

[0937] In aspects, delivery of an EA of an ASFV AgES CEPESC induces anti-ASFV IR(s) in TR(s). In aspects, CEPESC(s) are administered two or more times to TR(s). In aspects, administered CEPESC(s) are identical. In aspects, they are different. In aspects, other compositions are administered in association with CEPESC(s), such as NAMs comprising EPES(s) encoding PIM(s), CI(s), ITII(s), Ag(s), NANCIPI(s), and the like. In aspects, IR(s) comprise DOS increasing the number or activity of one or more IC(s), such as Ag-specific T-cells, BCs, or both; increasing the number or activity of Ag-specific CD4 or CD8 cells; increasing the number or activity of NKCs; increasing the number or activity of TCR-γδ T cells; or a combination thereof. In aspects, IR(s) lead to CE(s), such as DOS reduction in ASFV morbidity or mortality. In aspects, CE(s)/IR(s) comprise DOS reduction in viral shedding, viremia, or CT. In AOTI, CE(s) comprise reduced transmission of ASFV, improved memory response(s) to ASFV(s), or both (e.g., after 6, 9, 12, 18, 24, or 36 months). In AOTI, CE(s) comprise reduction in one or more ASFV symptoms; such as fever; decreased appetite; weakness; diarrhea; vomiting; coughing; skin reddening, blotching or other discoloration (hyperaemia and cyanosis); and respiratory ailments. In aspects, CE(s) include DOS improved economic indicators for swine (see elsewhere here). In aspects, CE(s) include DOS improved live birth rates, improved rate of survival to adulthood in pigs, or both. Aspects can include reduction in ASFV nucleic acids (e.g., by PCR), antibody titers (e.g., by ELISA measurements), etc. in infected TR(s) or upon challenge. ASFV AgES(s) can be delivered as prophylactics (e.g., in sows, piglets, or both) or therapeutics.

### 6) Equine Herpesvirus

[0938] In AOTI, CEPESCs comprising equine herpesvirus (EHV) AgES(s) and gDP(s) are provided. Such CEPs can comprise any suitable number of EHV Ag(s) from any suitable type of EHV and EHV PPT(s). In aspects, EHV Ag(s) comprise EHV-1 Ag(s), EHV-4 Ag(s), or both. In aspects, CEP(s) comprise EHV-1 or EHV-4 Ag(s) that are EHV-1 and EHV-4 cross-protective (inducing DOS IR(s) against both types of EHV(s)). EHV Ag(s) can be of or related to any type/subtype or strain of EHV, e.g., an EHV strain exemplified in U.S. Pat. No. 7,323,178. In aspects, OSMA of the EHV Ag(s) in a CEP are from genes that have homologs in other alphaherpesviruses (e.g., PRV, HSV, GHV, or BHV). In aspects, OSMA EHV Ag(s) are from or related to the 5 EHV EPs that lack homologs in other AHVs. In aspects, OSMA EHV Ag(s) are structural PPTs (e.g., core proteins, nucleocapsid proteins, virion tegument particle proteins, or CT). In aspects, OSMA of the EHV Ag(s) are EHV envelope proteins. In aspects, OSMA of the EHV Ag(s) of a CEP are EHV glycoproteins (e.g., gB (gp14), gC (gp13) gD (gp18), gD, gE, gH, gI, gK, gL, gM, gp21/22a, gp10, or combinations). Such PPTs are KITA (SFE U.S. Pat. No. 6,193,983). In AOTI, CEPs lack any Ag(s) RVRHRSI to gDS(s) of gDP(s), such as gDAgFP(s) of the CEP. In aspects, EHV Ag(s) comprise gH or gC polypeptides (SFE, U.S. Pat. No. 6,083,511). In AOTI, OSMA of the EHV Ag(s) are of or are related to EHV gB, gC, or gD Ag(s). In aspects, EHV Ag(s) of CEPs comprise an EHV alpha-TIF Ag (ORF12 Ag). EHV PPTs are KITA (SFE, Paillot et al. Open Veterinary Science Journal, 2008, 2, 68-91).

[0939] In aspects, OSMA EHV Ag(s) comprise TCE(s), such as MHCIEs or MHCIIEs. In aspects, EHV Ag CEPs comprise both MHCIEs and MHCIIEs. Examples of EHV T-cell Ags are known in the art and such Ag(s) can be adapted to use in EHV AgES(s) of constructs. SFE Soboll G et al. J Gen Virol. 2003; 84(Pt 10):2625-2634. doi:10.1099/vir.0.19268-0 and Kydd, J. H et al. “The immediate early protein of equine herpesvirus-1 (EHV-1) as a target for cytotoxic T lymphocytes in the Thoroughbred horse” at https://core.ac.uk/download/pdf/42494343.pdf.

[0940] In aspects, EHV Ag(s) comprise EHV immediate early gene ICP4 (ICP4) epitope(s). In aspects, EHV Ag(s) comprise α-TIF (ETIF; VP16-E) epitope(s) (SFE von Einem et al. Journal of Virology 80 (6) 2609-2620; DOI: 10.1128/JVI.80.6.2609-2620.2006). In aspects, EHV Ag(s) comprise ICP4 and α-TIF TCEs. In aspects, EHV Ag(s) comprise TCE(s) of or that are related to epitopes of α-TIF, ICP0, ICP22, ICP2, or combinations.

[0941] In aspects, EHV Ag(s) of CEPs comprise FV(s) in which 1 BCE(s) in WTC(s) are removed. In aspects, EHV Ag(s) lack any known EHV BCEs.

[0942] In aspects, EHV Ag(s) of CEPs comprise one or more EHV BCEs. EHV BC Ags and antibodies are known in the art. SFE Ken Maeda et al. Journal of Clinical Microbiology March 2004, 42 (3) 1095-1098; DOI: 10.1128/JCM.42.3.1095-1098.2004 and WO1994016093. Known EHV BC Ags/BCEs can be adapted for incorporation in EHV AgES(s). Anti-EHV Abs and Ab AARS(s) can also be incorporated into EPs, such as NGDFPs.

[0943] In aspects, EHV Ag(s) comprise AgV(s). In aspects, OSMA of EHV Ag(s) are GSRAgV(s). E.g., a GSRV variant of the EHV-1 α-TIF (UniProt P28938) can comprise GSVR(s) at the possible NLG sites starting at residue 49, residue 452, or both, e.g., by replacing N AAs at such positions with D residues.

[0944] In aspects, EHV Ag CEPs comprise CRA(s), PCRA(s), or both.

[0945] In aspects, EHV Ag CEP comprises Ag-associated ITS(s). In aspects, OSMA of the ITS(s) are PTPS(s). In aspects, PTPS(s) are polyUb(s).

[0946] In aspects, EHV Ag CEP(s) comprise ICSTAP(s) or ITICITM(s). In aspects, ITII(s) comprise EAT-2 PPT(s) or EAT-2 AARS(s). In aspects, ITIIES(S) are in a NAM separate from a gDAgFPESNAM.

[0947] In aspects, OSMA of EHV Ag(s) are in PE(s). In aspects EHV Ag PE(s) comprise MSL(s), FL(s), MSFL(s), cleavage sites, or combinations.

[0948] In AOTI, EHV Ag CEP(s) comprise CI(s). In aspects, gDS(s) of the CEP are CI(s). In AOTI, CEPs comprise NGDCI(s). In AOTI, CEPs include both.

[0949] In aspects, EHV Ag CEP(s) comprise NCMIMP(s), e.g., cytokine(s).

[0950] In aspects, OSMA of the EHV Ag(s) are contained in gDAgFP(s). In aspects, gDP(s) comprise MgDS(s). In aspects, gDP(s) comprise gDSS(s). In aspects, MgDS(s) comprise gDS(s) with enhanced nectin-1 protein affinity, reduced HVEM binding, or both.

[0951] In aspects, EHV Ag(s) do not comprise EHV gD Ag(s).

[0952] In aspects, gDP(s) comprise gDS(s) that are more RVRHRSII to a WT EHV gDS than an HSV gD. In AOTI, gDP(s) comprise WT EHV gDS(s), e.g., a sequence RVRHRSIOI to SEQ ID NO:698. In aspects, a WT EHV gD comprises a TMD, intravirion domain, or both, e.g., SEQ ID NO:699. In aspects, either type of gDP or other gDP comprises a sequence that is RVRHRSII to an EHV gDSS, such as SEQ ID NO:700.

[0953] In aspects, EPES NAM(s) comprise EEI(s), SCUP(s), or both. In aspects, OSMA EPES(s) are contained in NAV(s), such as mRNA(s) or plasmids. In aspects, EPES(s) are in plasmid(s) associated with TFA(s), such as CaPNP(s). In aspects, an EHV AgES CEPES(s) are contained in two or more NAM(s). In aspects, one type of NAM comprises a gDAgFPES and a second type of NAM in the CEPESC comprises NS(s) encoding different gDAgFP(s), Ag(s), PE(s), ITII(s), NGDCI(s), NANCIPI(s), NGDICRTSAGFP(s) and the like.

[0954] In aspects, EHV AgES CEPESC comprise CCC(s), such as EHV vaccines, EHV therapeutics, other immunogenic agents, and the like.

[0955] In AOTI, delivering EA of an EHV AgES CEPESC to a TR induces DOS IR(s). In aspects, IR(s) comprise DOS proliferation of IC(s), activation of IC(s), or both. In AOTI, activated or proliferated ICs comprise T-cells, BCs, NKC(s), or CT. In aspects IR(s) comprise DOS cytokine expression from IC(s).

[0956] In aspects, delivering EA of an EHV induces DOS CE(s) in TR(s), such as reduction of EHV shedding, reduction of viremia, reduction of abortion, increase in rate of live births, increase in rate of horses reaching adulthood, reduction in respiratory tract disease (e.g., rhinopharyngitis or tracheobronchitis), a reduction in frequency of EHV-associated ocular diseases (e.g., reduction in EHV associated uveitis or chorioretinal lesions); reduction in neurological lesions (e.g., microlesions); reduction in non-suppurative vasculitis; reduction in EHV spread through a population; reduction in frequency or severity of myeloencephalopathy; or combinations thereof. Aspects of EHV conditions are described in, e.g., Allen G P et al. Equid herpesvirus-1 (EHV-1) and -4 (EHV-4) infections. In: Coetzer, J A W and Tustin, R C (Eds.), Infectious diseases of livestock. 2nd Edn. Oxford Press: Cape Town; 2004. pp. 829-859. Chapter 76 and Oladunni F S et al. Front Microbiol. 2019; 10:2668. Published 2019 Dec. 3. doi:10.3389/fmicb.2019.02668.

[0957] In aspects, delivering an EA of an EHV AgES CEPESC induces DOS enhanced memory IR(s) against EHV, such as DOS memory T cell response(s).

### 7) Coronavirus

[0958] In aspects, CEPESCs comprising coronavirus (CoV or COV) AgES(s) are provided. CoV Ag CEPs can comprise any suitable number of COV Ag(s) from any suitable type of COV and any suitable type of COV antigens. In aspects, OSMA of the COV Ag(s) are beta-coronavirus Ag(s), alpha-coronavirus Ag(s), or combinations. In aspects, OSMA CoV Ag(s) in a CEP are beta-coronavirus Ag(s). In aspects, OSMA CEP Cov Ag(s) are Embecovirus Ag(s), Hibecovirus Ag(s), Merbecovirus Ag(s), Nobecovirus Ag(s), or Sarbecovirus Ag(s). In aspects, OSMA CoV Ag(s) are from alpha-COV(s).

[0959] In aspects, OSMA COV Ag(s) of CEPs are from a COV that has been identified of posing a substantial risk of zoonosis. In aspects, OSMA CEP COV Ag(s) are from a strain of COV that (currently) primarily infects NAH(s). In aspects, OSMA CEP COV Ag(s) are from a bat COV (e.g., a genus Betacoronavirus, subgenus Sarbecovirus CoV, e.g., bat-SL-CoVZC45 or bat-SL-CoVZXC21). In aspects, OSMA COV Ag(s) are Ag(s) from or related to COV(s) that primarily infect 2 or more species.

[0960] In aspects, OSMA COV Ag(s) in CEPs are from or related to a COV known to infect humans (e.g. HCoV 229E, NL63, OC43, or HKU1). In aspects, OSMA CEP Cov Ag(s) are HCoV alpha-CoV(s) (e.g., 229E or NL63 COV(s)). In aspects, OSMA CEP Cov Ag(s) are HCov beta-CoV(s) (e.g., OC43 or HKU1).

[0961] In aspects, OSMA CEP COV Ag(s) are of or related to non-SARS human CoVs. In aspects, OSMA CEP COV Ag(s) are from “common cold” COV strains (e.g., OC43, or 229E).

[0962] In aspects, OSMA CEP COV Ag(s) are from a SARS-associated CoV (SACOV), a MERS-associated CoV (MACOV) (a.k.a. hCoV-EMC), or combination. In aspects, OSMA CEP Cov Ag(s) are separately from either SACOV(s) or MERCOV(s). In aspects, OSMA CoV Ag(s) are Ag(s) from or related to SARS-CoV (identified in 2002, Betacoronavirus, subgenus Sarbecovirus)(COV1), or SARS-CoV-2 (identified 2019 in Wuhan, China) (COV2).

[0963] In aspects, OSMA CEP COV Ag(s) comprise Ag(s) of or related to a COV spike glycoprotein (S), nucleocapsid (N), envelope (E), or membrane glycoprotein (M). In aspects, COV Ag(s), e.g., SACOV Ag(s), comprise ORF3/ORF3a Ag(s), nsp6 Ag(s), or both, in aspects in combinations with N Ag(s), S Ag(s), or M Ag(s). Examples include combinations of S and M Ag(s), S and nsp6 Ag(s), S and ORF3a Ag(s), S and N Ag(s), or S-M-N Ag(s), S-nsp6-ORF3a Ag(S), and other combinations. In aspects, OSMA of S Ag(s) are from either the S1 portion of S or the S1 portion of S. Certain p-Cov Ag(s) can include Ag(s) against HE (hemagglutinin-esterase (HE)). In aspects, OSMA Cov Ag(s) are ORF1ab Ag(s). In aspects, OSMA of Cov Ag(s) are from a defined receptor binding domain (RBD). In aspects, OSMA of Cov Ag(s) are structural proteins. In aspects, OSMA of Cov Ag(s) are non-structural proteins. In aspects, COV Ag(s) comprise a mix of structural and nonstructural Ag(s).

[0964] In aspects, a COV Ag comprises most, generally all, or at least substantially all of WT COV PPT(s) (or identified COV PPT domains, such as S1 or S2) or a RVRHRSI FV. A CEP can, e.g., comprise a complete or at least generally complete COV S protein or S domain, such as a SARS COV2 S sequence (e.g., SEQ ID NO: 14 or a HR or SI FV); a complete or at least generally complete SARS COV2 N sequence (e.g., SEQ ID NO: 15 or a HR or SI FV); a complete or at least generally complete COV M protein, such as a SARS COV2 M sequence (e.g., SEQ ID NO: 16 or a HR or SI FV); or combinations.

[0965] In aspects, a COV Ag CEP comprises multiple BCEs, multiple TCEs (e.g., multiple MHCIEs and multiple MHCIIEs), or combinations. In aspects, OSMA of such multiple Ag(s) are in PE(s). In aspects, PE(s) comprise MSL(s), FL(s), MSFL(s), cleavage sites, or combinations. In aspects, SMOA of the COV Ag(s) in a CEP induce Ag-specific IR(s) in a significant amount of, most of, or at least generally all of TR(s). In aspects, immunodominant epitopes, such as immunodominant TCE(S) are modified, excluded, expressed in lower amounts, etc., to ensure SMOA Ag(s) induce IR(s). Such principles apply to any aspect of the invention, not just COV-related CEPESCs or related methods.

[0966] Coronavirus proteins are known in the art. For example, a genome of a SARS-CoV-2 is described in, e.g., Lu R et al. Lancet. 2020; 395(10224):565-574. doi:10.1016/S0140-6736(20)30251-8. An example of a source of candidate sequences and virus that can be used in development/testing of constructs (e.g., for the selection of PCRA(s) to be included in a CEP) is provided at NCBI Reference Sequence: NC_045512.2. Additional aspects of SARS-Cov2 biology that can be applied to aspects of the invention re described in Fehr A R et al Methods Mol Biol. 2015; 1282:1-23. doi:10.1007/978-1-4939-2438-7_1 and Wu A et al. Cell Host Microbe. 2020; 27(3):325-328. doi:10.1016/j.chom.2020.02.00.

[0967] CoV Ag(s) can comprise TCE(s), BCE(s), or both. In aspects, COV Ag(s) comprise MHCIE(s) & MHCIIE(s). In AOTI, CoV Ag(s) comprise MHCIE(s), MHCIIE(s), & BCE(s). In aspects, COV BCE(s) induce TR neutralizing Ab production in a significant number of TR(s). In AOTI, the presence of COV BCE(s) DOS enhances T-cell IR(s) in TR(s) in Cov infected or challenged TR(s).

[0968] In aspects, COV TCE(s) in a CEP PCGCOSCOCO TH1TCEs, In aspects of developing Cov CRA(s), PCRA(s) are tested for Th1 cytokine responses to select TH1TCE(s). In methods of inducing CoV IR(s) in TR(s) comprising COV AgES CEPESC(s), OSMA of the TR(s) are tested for Th2 cytokine levels before or during the method and levels of Th2 cytokines above a standard result in (a) administering a different CEPESC (e.g., a CEPESC that induces a lower Th2 response, a greater Th1 response, or both), (b) changing the dosage frequency, amount, etc., of any further CEPESC administrations, (c) temporarily or permanently stopping any CEPESC method, (d) applying any suitable method for reducing or counteracting the Th2 cytokine level, or (e) combinations. Such composition and method AOTI can be applied to any type of CEPESC or method AOTI (e.g., a CEPESC primarily comprising cancer-related AgES(s) or other pathogen AgES(s)), but such AOTI can be very relevant in certain COV infections, such as where Th2 cytokine levels have been associated with DOS increased levels of COV-associated fatalities or risks thereof).

[0969] In aspects, OSMA CoV Ag(s) in a CEP induce IR(s) that are cross-reactive against multiple types of CoV(s) (e.g., common cold HCOVs and SACOVs; MERSCOV(s) and SARSCOV(s), bat COV(s) and human COV(s), or SARSCOV1(s) and SARSCOV2(s)). Several predictive cross-reactive epitopes are KITA and such knowledge can be adapted to CEPESCs of the invention. Given this fact, CRA methods also can comprise a step of identifying cross-reactive Ag(s) (an aspect that can also apply to other DCA-associated Ag methods—e.g., identifying Ag(s) cross reactive against multiple AHVs).

[0970] Specific CoV epitopes have also been experimentally determined or predicted. In aspects, OSMA of the CoV epitopes are from proven epitopes. In aspects, OSMA are from predicted epitopes, such as any of the specifically predicted epitopes described in references provided herein. For example, Li C K. J Immunol. 2008; 181(8):5490-5500. doi:10.4049/jimmunol.181.8.5490 describes fifty-five T cell epitopes from 128 SARS-CoV1 patients, which can be incorporated herein. Examples include CoV S Ags RVRHRSIOI to SEQ ID NO:701 & ORF3 COV Ag(s) RVRHRSIOI to SEQ ID NO:702. Another SARS Cov epitope that can be expressed in CEPs is SEQ ID NO:703.

[0971] SARS-CoV1 (Sars-Cov) Ag(s) known to be functional epitopes that are in identical PPT(s) in SARS-Cov2 include SEQ ID NOs:704-706. These and numerous similar expected cross-reactive epitopes are described in Ahmed S F et al. Viruses. 2020; 12(3):254. doi:10.3390/v12030254. Such Ag(s) can be incorporated as PCRA(s) in CEP(s) or used as SARS-CoV2 PCRA(s).

[0972] Additional expected/confirmed SARS-Cov2 TCEs that can be incorporated individually or in combination in CEPs include S protein AARs S405-469, S480-499, and S510-521. In aspects, CEPs also include S370-395 and S435-479, which may comprise both TCEs and BCEs. These and more expected epitopes are described in Zhang et al., 2020, Mapping the Immunodominance Landscape of SARS-CoV-2 Spike Protein for the Design of Vaccines against COVID-19, a copy of which is available at https://www.biorxiv.org/content/10.1101/2020.04.23.056853v.full.pdf.

[0973] Additional predicted SARS-CoV2 epitopes include ITLCFTLKR, which is characterized in Joshi A et al. Inform Med Unlocked. 2020; 19:100338. doi:10.1016/j.imu.2020.100338, the numerous predicted epitopes reported in Kiyotani, K., Toyoshima, Y., Nemoto, K. et al. Bioinformatic prediction of potential T cell epitopes for SARS-Cov-2. J Hum Genet (2020). https://doi.org/10.1038/s10038-020-0771-5; K. M. Kaderi Kibria, e tal. NatureResearch. 2019. DOI: 10.21203/rs.3.rs-21853/v1; Sahoo B et al. International Journal of Applied Biology and Pharmaceutical Technology 11 (2020): 37-45; Bhattacharya, M et al. J Med Virol. 2020; 92: 618-631. https://doi.org/10.1002/jmv.25736; and Marek Prachar et al. bioRxiv 2020.03.20.000794; doi: https://doi.org/10.1101/2020.03.20.000794 (including AARS(s) common to Cov-MERS/SARS-Cov2 and SARS-CoV1 and SARS-CoV2. Examples of predicted epitopes reported in these references that can be used as PCRA(s) in CEP(s) include SEQ ID NOs:707-715 (and FFs/FVs).

[0974] In aspects, OSMA of COV Ag(s) in a CEP are AgV(s). In aspects, OSMA AgV(s) comprise GSRV(s) (e.g., CB substitutions or deletions in one, several, or all of the N-X-S sequences or N-X-T AARS motifs present in WTC Ag(s)). In aspects, introducing OOM GSRV(s) is a step in generating PCRA(s). In aspects, OSMA of COV AgV(s) are editopes. In aspects, OSMA of COV Ag(s) or a subset thereof, such as BC Ag(s) comprise glycosylation site addition variations. For example, the BCE for SARS-CoV1/CoV2 cross-reactive Ab CR3022 in SARS-Cov2 can be modified to enhance glycosylation sites (e.g., in a manner corresponding to the BCE epitope for CR3022 in SARS-Cov1, adding an NLG site at N protein residue 370), thereby reducing Kd of the Abs for the site to less than 100 nM, 50 nM≤, 20 nM≤, or less than 10 nM. Such an approach is described in Yuan et al. Science 8 May 2020: 630-633. In AOTI, consensus sequence PCRA(s) can be developed from corresponding sequences of various COV(s), from identifying differences in highly related sequences of COV(s) that may be associated with different levels of immunogenicity (as exemplified by the CR3022 epitope example), or both. Several of the references cited in this section also employ such approaches to propose COV TCEs and BCEs.

[0975] In an aspect, COV AgV(s) comprise FV(s) having a sequence that is the same as a full length or generally full length COV PPT sequences.

[0976] In an aspect, COV AgV(s) include S PPT AgV(s) according to the formula of SEQ ID No:20), where each X is N/D and least one of X₁-X₂₂ is a D. In aspects, at least 2, ≥3, ≥4, or ≥5 Xs are D AAs. In aspects, most of X₁-X₂₂ are D residues. In aspects, generally all of X₁-X₂₂ (e.g., 90%) are D AAs.

[0977] In aspects, COV Ag(s) comprise a Cov N PPT AgV(s) according to the formula of SEQ ID NO:21, wherein each of X₁-X₆ is N/D & 1 of X₁-X₆ is a D. In aspects, at least 2, ≥3, ≥4, at least 5, or all of X₁-X₆ are D residues.

[0978] In aspects, COV Ag(s) comprise a COV M protein AgV comprising at least the N-terminal 10%, 15%, 25%, or 33% of SEQ ID NO:22.

[0979] In aspects, COV Ag CEP(s) comprise ITS(s), e.g., PTPS(s), e.g., polyUb(s). In aspects, ITS(s) comprise non-PTPS ITS(s), e.g., ERTP(s).

[0980] In aspects, a COV AgES CEPESC comprises ITIIES(s). In aspects, a CEP comprises ITII(s) comprising EAT-2 PPT(s) or AARS(s) (e.g., hEAT-2, mEAT-2, a FF of either, or a FV). In aspects, ITIIES(s) are on NAM(s) separate from OSMA of the COV AgES(s) of the CEPESs.

[0981] In aspects, a COV Ag CEP comprises CI(s). In aspects, a COV Ag CEP lacks CI(s). In aspects, gDS(s) in the CEP exhibit CI functions in TR(s). In aspects, gD(s) in the CEP do not exhibit CI functions in TR(s). In aspects, the CEP comprises NGDCI(s). In aspects, NGDCI(s) in CEP comprise PD-L1(s), PD-1(s), or CD112R CI(s). In aspects, CEP(s) comprise TOM CI(s). In aspects, CEP(s) comprise gDS CI(s) and NGDCI(s). In aspects, a NGDCI is a multimeric non-Ab sequence CI, such as a trap PPT.

[0982] In aspects, a COV Ag CEP comprises NCMIMP(s). In AOTI, NCMIMP(s) comprise Th1 cytokine(s). In AOTI, Th1 cytokines comprise, PC, or consist of IFNg, IL-2, or both, or FFs/FVs thereof.

[0983] In aspects, OSMGAOA COV Ag(s) are contained in gDAgFP(s). In aspects, OSMA COV Ag(s) are positioned downstream of any gDS(s) in gDAgFP(s). In aspects, some COV Ag(s) are positioned internal to gDSs and some COV Ag(s) are positioned downstream of any gDSs of gDAgFP(s).

[0984] In aspects, OSMA of the gDP(s) of a CEP comprise MgDS(s). In aspects, gDAgFP(S) exhibit DOS reduced HVEM binding, exhibit enhanced nectin-1 binding, or both. In aspects, gDP(s) of a CEP comprise gDSS(s).

[0985] In aspects, EPESs are contained in 2+ NAM(s). In aspects, 1 NAM comprises gDAgFPES and 1 NAM comprises NS encoding a different gDAgFP(s), COV Ag(s); ICSTAP(s)/ICITM(s); NGDCI(s); NCMIMP(s); or CT.

[0986] In aspects, OSMA of any NAMs of a CEPESC are NAV(s). In aspects, NAV(s) are mRNA NAV(s). In aspects, NAV(s) are plasmids. In aspects, plasmids are associated with TFA(s), such as CaPNP(s).

[0987] In aspects, CEPESCs comprise CCC(s), such as anti-COV vaccines, anti-COV therapeutics, or both. In aspects, CEPESC(s) are AAW such agent(s).

[0988] In aspects, the delivery of an EA of CEPESC(s) to TR(s) results in DOS anti-COV IR(s). In aspects, IR(s) comprise reduction in viral shedding, reduction in the amount of virus, reduction in the amount of COV nucleic acids, reduction in COV antibodies, or combinations, in TR(s). In aspects, IR(s) comprise DOS increases in population or activity of NKCs, DCs, T-cells (CD4 or CD8), BCs, or combinations. In aspects, IR(s) comprise one or more T-cell IR(s). Aspects of anti-COV T-cell IR(s) are exemplified in, e.g., Li C K, Wu H, Yan H, et al. T cell responses to whole SARS coronavirus in humans. J Immunol. 2008; 181(8):5490-5500. doi:10.4049/jimmunol.181.8.5490. In aspects, IR(s) comprise DOS in immunological memory for COV(s). In aspects, IR(s) comprise DOS increase in memory T-cells. In aspects, IR(s) comprise DOS increases in COV-associated cytokine production. In aspects, increased cytokine production PCOGCOCO Th1 cytokine production.

[0989] In aspects, anti-COV IR(s) lead to anti-COV CE(s). In aspects, CE(s) comprise DOS reduction in COV-associated fever, cough, dyspnea, diarrhea, or combinations. In aspects, CE(s) comprise DOS reduced frequency, duration, or severity of COV-associated disease or hospitalization, recurrence, or transmission of COV. In aspects, CE(S) comprise reduced fatality rates in a population of TR(s). In aspects, TR(s) comprise elderly human patients (e.g., at least 65, at least 70, at least 75, or at least 80 years of age), patients with comorbidities (e.g., respiratory illness, obesity, diabetes, hyperlipidemia, coronary artery disease, renal disease, dementia, COPD, cancer, atrial fibrillation, heart disease, heat failure, or combinations. In aspects, TR(s) are not fully developed (i.e., children or young NAHs).

[0990] In aspects, delivery of COV AgES CEPESCs are repeated TOM times. In aspects, delivery of COV AgES CEPESC(s) is performed in non-infected TR(s) as a prophylactic/vaccination. In aspects, delivery of an EA of COV AgES CEPESC(s) is performed in infected patients as a therapeutic.

### a. Bacterial Ags & Epitopes

[0991] In aspects, Ag(s) in a CEP comprise bacterial-associated Ag(s). Examples of such aspects include EPs comprising Ag(s) against Neisseria spp, including N. gonorrhea and N. meningitidis (e.g., transferrin-binding proteins, lactoferrin binding proteins, PiC, or adhesins); S. pyogenes (for example M proteins or fragments thereof), S. agalactiae, S. mutans; H. ducreyi; Moraxella spp, including M catarrhalis, also known as Branhamella catarrhalis (for example high and low molecular weight adhesins and invasins); Bordetella spp, including B. pertussis (for example pertactin, pertussis toxin, filamenteous hemagglutinin, adenylate cyclase, or fimbriae), B. parapertussis, B. bronchiseptica; Mycobacterium spp., including M. tuberculosis (for example ESAT6, Antigen 85A, -B or -C, MPT 44, MPT59, MPT45, HSP10, HSP65, HSP70, HSP 75, HSP90, PPD 19 kDa [Rv3763], or PPD 38 kDa [Rv0934]), M. bovis, M. leprae, M. avium, M. paratuberculosis, M. smegmatis; Legionella spp, including L. pneumophila; Escherichia spp, including enterotoxic E. coli (e.g., colonization factors, heat-labile toxin or derivatives thereof, heat-stable toxin or derivatives thereof), enterohemorragic E. coli, enteropathogenic E. coli (for example shiga toxin-like toxin or derivatives thereof); Vibrio spp, including V. cholera (for example cholera toxin); Shigella spp, including S. sonnei, S. dysenteriae, S. flexnerii; Yersinia spp, including Y. enterocolitica (for example a Yop protein), Y. pestis, Y. pseudotuberculosis; Campylobacter spp, including C. jejuni (for example toxins, adhesins, and invasins) and C. coli; Salmonella spp, including S. typhi, S. paratyphi, S. choleraesuis, S. enteritidis; Listeria spp., including L. monocytogenes; Helicobacter spp, including H. pylori (for example urease, catalase, or vacuolating toxin); Pseudomonas spp, including P. aeruginosa; Staphylococcus spp., including S. aureus, S. epidermidis; Enterococcus spp., including E. faecalis, E. faecium; Clostridium spp., including C. tetani (for example tetanus toxin), C. botulinum (for example botulinum toxin), C. difficile (for example clostridium toxins A or B); Bacillus spp., including B. anthracis (for example botulinum toxin); Corynebacterium spp., including C. diphtheriae (for example diphtheria toxin); Borrelia spp., including B. burgdorferi (for example OspA, OspC, DbpA, or DbpB), B. garinii (for example OspA, OspC, DbpA, or DbpB), B. afzelii (for example OspA, OspC, DbpA, or DbpB), B. andersonii (for example OspA, OspC, DbpA, or DbpB), B. hermsii; Ehrlichia spp., including E. equi and the agent of the Human Granulocytic Ehrlichiosis; Rickettsia spp, including R. rickettsii; Chlamydia spp., including C. trachomatis (for example MOMP or heparin-binding proteins), C. pneumoniae (for example MOMP or heparin-binding proteins), C. psittaci; Leptospira spp., including L. interrogans; Treponema spp., including T. pallidum (e.g., rare outer membrane proteins), T. denticola, T. hyodysenteriae; or derived from parasites such as Plasmodium spp., including P. falciparum; Toxoplasma spp., including T. gondii (for example SAG2, SAG3, or Tg34); Entamoeba spp., including E. histolytica; Babesia spp., including B. microti; Trypanosoma spp., including T. cruzi; Giardia spp., including G. lamblia; Leshmania spp., including L. major; Pneumocystis spp., including P. carinii; Trichomonas spp., including T. vaginalis; Schisostoma spp., including S. mansoni, or derived from yeast such as Candida spp., including C. albicans; Cryptococcus spp., including C. neoformans. Antigens against M. tuberculosis include Rv2557, Rv2558, RPFs: Rv0837c, Rv1884c, Rv2389c, Rv2450, Rv1009, aceA (Rv0467), PstS1, (Rv0932), SodA (Rv3846), Rv2031c 16kDa1, Tb Ra12, Tb H9, Tb Ra35, Tb38-1, Erd 14, DPV, MTI, MSL, mTTC2 and hTCC1 (WO 99/51748) and fusions thereof, e.g., Ra12-TbH9-Ra35, Erd14-DPV-MTI, DPV-MTI-MSL, Erd14-DPV-MTI-MSL-mTCC2, Erd14-DPV-MTI-MSL, DPV-MTI-MSL-mTCC2, TbH9-DPV-MTI (WO 99/51748). Ags against Chlamydia include for example the High Molecular Weight Protein (HWMP) (WO 99/17741), ORF3 (EP 366 412), and putative membrane proteins (Pmps), as well as others described in WO 99/28475. Ags against Streptococcus spp, including S. pneumoniae, include PsaA, PspA, streptolysin, and choline-binding proteins, and the protein antigen Pneumolysin (Biochem Biophys Acta, 1989, 67, 1007; Rubins et al., Microbial Pathogenesis, 25, 337-342), and mutant detoxified derivatives thereof (WO 90/06951; WO 99/03884). Other preferred bacterial vaccines comprise antigens derived from Haemophilus spp., including H. influenzae type B (for example PRP and conjugates thereof), non-typeable H. influenzae, for example OMP26, high molecular weight adhesins, P5, P6, protein D and lipoprotein D, and fimbrin and fimbrin derived peptides (U.S. Pat. No. 5,843,464) or multiple copy variants or fusion proteins thereof. Ag(s) can be Ag(s) of or related to bacteria of any suitable phyla, such as Acidobacteria, Actinobacteria, Aquificae, Bacteroidetes, Caldiserica, Chlamydiae, Chlorobi, Chloroflexi, Chrysiogenetes, Cyanobacteria, Deferribacteres, Deinococcus-Thermus, Dictyoglomi, Elusimicrobia, Fibrobacteres, Firmicutes, Fusobacteria, Gemmatimonadetes, Lentisphaerae, Nitrospira, Planctomycetes, Proteobacteria, Spirochaetes, Synergistetes, Tenericutes, Thermodesulfobacteria, Thermotogae, and Verrucomicrobia.

[0992] Bacterial Ag(s) can be against Gram positive bacteria, Gram negative bacteria, acid-fast bacteria, or combinations. Gram positive bacteria include Actinomedurae, Actinomyces israelii, Bacillus anthracis, Bacillus cereus, Clostridium botulinum, Clostridium difficile, Clostridium perfringens, Clostridium tetani, Corynebacterium, Enterococcus faecalis, Listeria monocytogenes, Nocardia, Propionibacterium acnes, Staphylococcus aureus, Staphylococcus epiderm, Streptococcus mutans, Streptococcus pneumoniae and the like. Gram negative bacteria include Afipia felis, Bacteroides, Bartonella bacilliformis, Bortadella pertussis, Borrelia burgdorferi, Borrelia recurrentis, Brucella, Calymmatobacterium granulomatis, Campylobacter, Escherichia coli, Francisella tularensis, Gardnerella vaginalis, Haemophilius aegyptius, Haemophilius ducreyi, Haemophilius influenziae, Heliobacter pylori, Legionella pneumophila, Leptospira interrogans, Neisseria meningitidia, Porphyromonas gingivalis, Providencia sturti, Pseudomonas aeruginosa, Salmonella enteridis, Salmonella typhi, Serratia marcescens, Shigella boydii, Streptobacillus moniliformis, Streptococcus pyogenes, Treponema pallidum, Vibrio cholerae, Yersinia enterocolitica, Yersinia pestis and the like. As used herein, acid-fast bacteria include, but are not limited to, Myobacterium avium, Myobacterium leprae, and Myobacterium tuberculosis. Other bacteria include Bartonella henseiae, Chlamydia psittaci, Chlamydia trachomatis, Coxiella burnetii, Mycoplasma pneumoniae, Rickettsia akari, Rickettsia prowazekii, Rickettsia rickettsii, Rickettsia tsutsugamushi, Rickettsia typhi, Ureaplasma urealyticum, Diplococcus pneumoniae, Ehrlichia chafensis, Enterococcus faecium, Meningococci and the like.

[0993] Ag(s) can be associated with abaerobic bacterium or an anerobic bacterium and Ag(s) can be associated with autotrophic bacterium or a heterotrophic bacterium. Ag(s) can be associated with a mesophile, a neutrophile, an extremophile, an acidophile, an alkaliphile, a thermophile, a psychrophile, a halophile, or an osmophile.

[0994] In aspects, Ag(s) of CEPs induce IR(s) against bacterial pathogens. Bacterial pathogens include, but are not limited to, Acinetobacter baumannii, Bacillus anthracis, Bacillus subtilis, Bordetella pertussis, Borrelia burgdorferi, Brucella abortus, Brucella canis, Brucella melitensis, Brucella suis, Campylobacter jejuni, Chlamydia pneumoniae, Chlamydia trachomatis, Chlamydophila psittaci, Clostridium botulinum, Clostridium difficile, Clostridium perfringens, Clostridium tetani, coagulase Negative Staphylococcus, Corynebacterium diphtheria, Enterococcus faecalis, Enterococcus faecium, Escherichia coli, enterotoxigenic Escherichia coli (ETEC), enteropathogenic E. coli, E. coli O157:H7, Enterobacter sp., Francisella tularensis, Haemophilus influenzae, Helicobacter pylori, Klebsiella pneumoniae, Legionella pneumophila, Leptospira interrogans, Listeria monocytogenes, Moraxella catarralis, Mycobacterium leprae, Mycobacterium tuberculosis, Mycoplasma pneumoniae, Neisseria gonorrhoeae, Neisseria meningitides, Preteus mirabilis, Proteus sps., Pseudomonas aeruginosa, Rickettsia rickettsii, Salmonella typhi, Salmonella typhimurium, Serratia marcesens, Shigella flexneri, Shigella sonnei, Staphylococcus aureus, Staphylococcus epidermidis, Staphylococcus saprophyticus, Streptococcus agalactiae, Streptococcus mutans, Streptococcus pneumoniae, Streptococcus pyogenes, Treponema pallidum, Vibrio cholerae, and Yersinia pestis. Bacterial pathogens may also include bacteria that cause resistant bacterial infections, for example, clindamycin-resistant Clostridium difficile, fluoroquinolon-resistant Clostridium difficile, methicillin-resistant Staphylococcus aureus (MRSA), multidrug-resistant Enterococcus faecalis, multidrug-resistant Enterococcus faecium, multidrug-resistance Pseudomonas aeruginosa, multidrug-resistant Acinetobacter baumannii, and vancomycin-resistant Staphylococcus aureus (VRSA). In aspects, Ag(s) of a CEP induce IR(s) against an infectious bacteria, such as Mycobacterium tuberculosis, clindamycin-resistant Clostridium difficile, fluoroquinolon-resistant Clostridium difficile, methicillin-resistant Staphylococcus aureus (MRSA), multidrug-resistant Enterococcus faecalis, multidrug-resistant Enterococcus faecium, multidrug-resistance Pseudomonas aeruginosa, multidrug-resistant Acinetobacter baumannii, & vancomycin-resistant S. aureus (VRSA).

[0995] In aspects, bacterial Ag(s) in CEPs comprise Ag(s) of or related to PPT(s) of S. pyogenes, Neisseria gonorrhoeae, Acinetobacter baumannii, Klebsiella pneumoniae, Pseudomonas aeruginosa, Burkholderia cepacia, or CT.

[0996] Bacterial Ag(s) can be Ag(s) of or related to Salmonella, Escherichia, Pseudomonas, Bacillus, Vibrio, Campylobacter, Heliobacter, Erwinia, Borrelia, Pelobacter, Clostridium, Serratia, Xanothomonas, Yersinia, Burkholdia, Listeria, Shigella, Pasteurella, Enterobacter, Corynebacterium, or Streptococcus. Bacterial Ag(s) can be Ag(s) of or related to an anthrax bacterium, an antibiotic-resistant bacterium, a disease-causing bacterium, a food poisoning bacterium, an infectious bacterium, Staphylococcus bacterium, Streptococcus bacterium, or tetanus bacterium. Bacterial Ag(S) can be Ag(s) against mycobacteria, Clostridium tetani, Yersinia pestis, Bacillus anthraces, methicillin-resistant S. aureus (MRSA), Clostridium difficile, or M. tuberculosis.

[0997] In aspects, Ag(s) in CEP(s) comprise Mycobacterium tuberculosis antigen(s) (e.g., Ag(s) from the Ag85 family of TB Ags, for example, Ag85A and Ag85B; the Esx family of TB antigens, for example, EsxA, EsxB, EsxC, EsxD, EsxE, EsxF, EsxH, EsxO, EsxQ, EsxR, EsxS, EsxT, EsxU, EsxV, & EsxW; or CT).

[0998] In aspects, CEPs comprise Ag(s) against bacteria that primarily infect NAH(s) (e.g., companion animals, such as dogs, horses, or cats; livestock animals, such as pigs, cows, and sheep; or both). In aspects, CEPs comprise bacterial Ag(s) from bacteria that primarily infect humans. In aspects, CEPs comprise bacterial Ag(s) from bacteria that infect both humans and NHA(s) or that are considered at risk for zoonosis.

[0999] In aspects, CEPs comprise bacterial Ag(s) that are T-cell Ag(s), B-cell Ag(s), or both. In aspects, CEPs comprise anti-bacterial MHCIE(S), MHCIIE(s), or both. CEP(s) can comprise bacterial PPT PCRA(s), CRA(s), known bacterial Ag(S)/epitope(s), or combinations. Numerous epitopes for bacterial diseases are known in the art, including AgV(s). For example, known and variant M. tuberculosis TCEs that can be adapted for or incorporated into CEP(s) are described in Coscolla M et al. Cell Host Microbe. 2015; 18(5):538-548. doi:10.1016/j.chom.2015.10.008. S. aureus TCE(s) that can be used in CEPs are described in, e.g., Yang S et al. Microb Pathog. 2020; 144:104167. doi:10.1016/j.micpath.2020.104167; Ooi J D et al. Nat Commun. 2019; 10(1):3392. doi:10.1038/s41467-019-11255-0; and Yu S et al. Microb Pathog. 2015; 89:108-113. doi:10.1016/j.micpath.2015.09.006. Epitopes and identification of TCEs in Pseudomonas aeruginosa is exemplified in, e.g., Parmely M J et al. J Exp Med. 1984; 160(5):1338-1349. doi:10.1084/jem.160.5.1338 and Worgall S, Krause A, Rivara M, et al. Protection against P. aeruginosa with an adenovirus vector containing an OprF epitope in the capsid. J Clin Invest. 2005; 115(5):1281-1289. doi:10.1172/JCI23135 and related epitope prediction methods are described in Elhag et al. bioRxiv 720730; doi: https://doi.org/10.1101/720730; Clostridium difficile epitopes/Ags are described in, e.g., Broecker F et al. Nat Commun. 2016; 7:11224. doi:10.1038/ncomms11224 and Seregin S S, et al. Vaccine. 2012; 30(8):1492-1501. doi:10.1016/j.vaccine.2011.12.064.

[1000] In aspects, OSMA of bacterial Ag(s) in CEPs are AgV(s) (e.g., editope(s)). In aspects, OSMA AgV(s) comprise GSRV(s), other DIV(s), or CT.

[1001] In aspects, CEP(s) comprise bacterial PPT PCRA(s), CRA(s), or both.

[1002] In aspects, CEP(s) comprise multiple bacterial Ag(s). In aspects, multiple bacterial Ag(s) are from the same species, type, or strain of bacteria. In aspects, multiple Ag(s) are from different species, types, or strains of bacteria. In aspects, OSMA of the bacterial Ag(s) are in PE(s). In aspects, PE(s) comprise MSL(s), FL(s), MSFL(s), cleavage sites (e.g., 2A sites), or combinations, in association with OSMA of the Ag(s) in PE(s). In aspects, OSMA bacterial Ag(s) in a CEP are in gDAgFP(s).

[1003] In aspects, OSMA bacterial Ag(s) in CEPs are AW ITS(s), such as PTPS(s). In aspects, OSMA bacterial Ag(s) are associated with polyUb(s).

[1004] In aspects, a bacterial Ag CEP comprises ITII(s). In aspects, ITII(s) comprise EAT-2 PPT(s) or EAT-2 AARS(S) (e.g., EAT-2 FPs). In aspects, ITII(s) comprise hEAT-2, mEAT-2, FFs of either thereof, or FV of any thereof.

[1005] In aspects, a bacterial Ag CEP comprises CI(s). In aspects, gDS(s) act as CI(s) in TR(s). In aspects, a CEP comprises NGDCI(s). In aspects, a CEP comprises NGDCI(s) and gDS(s) that are CI(s) in TR(s). In aspects, NGDCI(s) comprise PD-L1 or CD112R CI(s). In aspects, CI(s) comprise multimeric non-Ab AAR Cis, such as trap proteins.

[1006] In aspects, a bacterial Ag CEP comprises NANCIPI(s), e.g., cytokine(s). In aspects, most or all NANCIPI(s) are Th1 cytokines.

[1007] In aspects, a bacterial Ag CEP comprises a gDAgFP comprising MgDS(s). In aspects, bacterial Ag CEP(s) comprise multiple gDP(s). In aspects, bacterial Ag CEPs comprise multiple bacterial Ag gDAgFPs. In aspects, OSMA gDP(s) in such a CEP comprise gDSS(s). In aspects, bacterial Ag CEPs comprise NGDICRTSFPs comprising bacterial Ag(s).

[1008] In aspects, bacterial AgES CEPESCs include EEI(s), ISNS(s), or CT.

[1009] In aspects, a bacterial AgES CEPESC comprises multiple NAMs. In aspects, a first NAM encodes a gDAgFP and a second NAM encodes a different gDP, bacterial Ag(s) (e.g., PE(s)), NGDICRTSFP(s), ITII(s), CI(s) (e.g., NGDCI(s)), NANCIPI(s), or combinations.

[1010] In aspects, OSMA of the NAM(s) of a bacterial AgES CEPESC are NAV(s), such as mRNA(s) or plasmid(s). In aspects, plasmid(s) are associated with TFA(s), such as CaPNP(s).

[1011] In aspects, bacterial AgES CEPESC(s) are combined with CCC(s), such as antibiotics, NAM(s) encoding anti-bacterial compositions, anti-bacterial peptides, etc. In aspects, methods of delivering such CEPESC(s) comprise administering one or more anti-bacterial agents (vaccines, antibiotics or other anti-bacterial therapeutics, etc.) to TR(s).

[1012] In aspects, delivery of EA(s) of bacterial AgES CEPESC(s) induce anti-bacterial IR(s) in TR(s). In aspects, IR(s) include reduction in bacterial Abs, bacterial NS(s) (e.g., as determined by qPCR), or both. In aspects, IR(s) comprise increase in the number or activity of IC(s), such as anti-bacterial T-cells, BCs, NKCs, APCs, and the like. In aspects, IR(s) lead to CE(s) such as the treatment of disorders, diseases, or conditions associated with bacterial infection including DOS reduction in abscesses, actinomycosis, acute prostatitis, Aeromonas hydrophila, annual ryegrass toxicity, anthrax, bacillary peliosis, bacteremia, bacterial gastroenteritis, bacterial meningitis, bacterial pneumonia, bacterial vaginosis, bacterium-related cutaneous conditions, bartonellosis, BCG-oma, botryomycosis, botulism, Brazilian purpuric fever, Brodie abscess, brucellosis, Buruli ulcer, campylobacteriosis, caries, Carrion's disease, cat scratch disease, cellulitis, chlamydia infection, cholera, chronic bacterial prostatitis, chronic recurrent multifocal osteomyelitis, clostridial necrotizing enteritis, combined periodontic-endodontic lesions, contagious bovine pleuropneumonia, diphtheria, diphtheritic stomatitis, ehrlichiosis, erysipelas, piglottitis, erysipelas, Fitz-Hugh-Curtis syndrome, flea-borne spotted fever, foot rot (infectious pododermatitis), Garre's sclerosing osteomyelitis, Gonorrhea, Granuloma inguinale, human granulocytic anaplasmosis, human monocytotropic ehrlichiosis, hundred days' cough, impetigo, late congenital syphilitic oculopathy, legionellosis, Lemierre's syndrome, leprosy (Hansen's Disease), leptospirosis, listeriosis, Lyme disease, lymphadenitis, melioidosis, meningococcal disease, meningococcal septicaemia, methicillin-resistant Staphylococcus aureus (MRSA) infection, Mycobacterium avium-intracellulare (MAI), mycoplasma pneumonia, necrotizing fasciitis, nocardiosis, noma (cancrum oris or gangrenous stomatitis), omphalitis, orbital cellulitis, osteomyelitis, overwhelming post-splenectomy infection (OPSI), ovine brucellosis, pasteurellosis, periorbital cellulitis, pertussis (whooping cough), plague, pneumococcal pneumonia, Pott disease, proctitis, pseudomonas infection, psittacosis, pyaemia, pyomyositis, Q fever, relapsing fever (typhinia), rheumatic fever, Rocky Mountain spotted fever (RMSF), rickettsiosis, salmonellosis, scarlet fever, sepsis, serratia infection, shigellosis, southern tick-associated rash illness, staphylococcal scalded skin syndrome, streptococcal pharyngitis, swimming pool granuloma, swine brucellosis, syphilis, syphilitic aortitis, tetanus, toxic shock syndrome (TSS), trachoma, trench fever, tropical ulcer, tuberculosis, tularemia, typhoid fever, typhus, urogenital tuberculosis, urinary tract infections, vancomycin-resistant Staphylococcus aureus infection, Waterhouse-Friderichsen syndrome, pseudotuberculosis (Yersinia) disease, yersiniosis, and combinations. In aspects, delivery of bacterial AgES CEPESCs results in a DOS enhanced IR, CE, or both (e.g., improved memory IR(s)) WRT existing anti-bacterial vaccines, such as peptide anti-bacterial vaccines.

### b. NVNBO Ags & Eptiopes

[1013] In aspects, an EP comprises Ag(s) against a non-viral, non-bacterial pathogenic organism (NVNBO), which in some aspects are microorganisms (NVNBMs). In aspects, NVNBOs comprise parasitic DCA(s) (parasite(s)). A parasite against which such Ag(s) can be directed can be, e.g., a protozoa, helminth, or ectoparasite. A helminth (i.e., worm) can be a flatworm (e.g., flukes and tapeworms), a thorny-headed worm, or a round worm (e.g., pinworms). Ectoparasites include e.g., lice, fleas, ticks, and mites. Pathogenic protozoans and helminths infections against which Ag(s) can be directed include: amebiasis; malaria; leishmaniasis; trypanosomiasis; toxoplasmosis; Pneumocystis carinii; babesiosis; giardiasis; trichinosis; filariasis; schistosomiasis; nematodes; trematodes or flukes; and cestode (tapeworm) infections. In aspects, parasite Ag(s) are associated with OOM of Acanthamoeba keratitis, Amoebiasis, Ascariasis, Babesiosis, Balantidiasis, Baylisascariasis, Chagas disease, Clonorchiasis, Cochliomyia, Cryptosporidiosis, Diphyllobothriasis, Dracunculiasis, Echinococcosis, Elephantiasis, Enterobiasis, Fascioliasis, Fasciolopsiasis, Filariasis, Giardiasis, Gnathostomiasis, Hymenolepiasis, Isosporiasis, Katayama fever, Leishmaniasis, Lyme disease, Malaria, Metagonimiasis, Myiasis, Onchocerciasis, Pediculosis, Scabies, Schistosomiasis, Sleeping sickness, Strongyloidiasis, Taeniasis, Toxocariasis, Toxoplasmosis, Trichinosis, and Trichuriasis. In aspects, parasite Ag(s) are associated with one or more of Acanthamoeba, Anisakis, Ascaris lumbricoides, Botfly, Balantidium coli, Bedbug, Cestoda (tapeworm), Chiggers, Cochliomyia hominivorax, Entamoeba histolytica, Fasciola hepatica, Giardia lamblia, Hookworm, Leishmania, Linguatula serrata, Liver fluke, Loa loa, Paragonimus-lung fluke, Pinworm, Plasmodium falciparum, Schistosoma, Strongyloides stercoralis, Mite, Tapeworm, Toxoplasma gondii, Trypanosoma, Whipworm, or Wuchereria bancrofti. In aspects, Ag(s) comprise parasite antigen(s) of or related to PPT(s) expressed in Babesia, Entomoeba, Leishmania, Plasmodium, Trypanosoma, Toxoplasma, Giarda, flat worms and round worms.

[1014] In AOTI, CEP(s) comprise Ag(s) of/related to Ag(s) of protozoa, e.g., Entamoeba histolytica, Giardia lambila, Trichomonas vaginalis, Trypanosoma brucei, T. cruzi, L. donovani, Balantidium coli, Toxoplasma gondii, Plasmodium spp., & Babesia microti. In AOTI, CEP(s) include Ag(s) of/related to parasites, e.g., Acanthamoeba, Anisakis, Ascaris lumbricoides, botfly, Balantidium coli, bedbug, Cestoda, chiggers, Cochliomyia hominivorax, Entamoeba histolytica, Fasciola hepatica, Giardia lamblia, hookworm, Leishmania, Linguatula serrata, liver fluke, Loa loa, Paragonimus, pinworm, P. falciparum, Schistosoma, Strongyloides stercoralis, mite, tapeworm, Toxoplasma gondii, Trypanosoma, whipworm, & Wuchereria bancrofti.

[1015] In aspects, CEP(s) comprise Ag(s) against a species of the genus Leishmania. In aspects, Leishmania Ag(s) comprise AARS(s) of or related to PPT(s) of an L. donovani complex Leishmania (e.g., an L. donovani or L. infantum (L. chagasi) PPT); an L. mexicana complex Leishmania (e.g., a L. mexicana, L. amazonensis, or L. venezuelensis PPT); L. tropica; L. major; L. aethiopica; or a member of the subgenus Viannia (e.g., a PPT of L. braziliensis, L. guyanensis, L. panamensis, or L. peruviana). In aspects, Leishmania Ag(s) are cross-protective against TOM Leishmania species, types, or strains.

[1016] In aspects, Leishmania Ag(s) comprise AARS(s) of or related to antigenic Leishmania PPTs such as gp63, H1, NH36, LACK, Leishmania PSA, Leishmania H2B, LmIRAB, P0, KMP-11, A2, HSP, HSC, LmSTI-1, CPa, CPb. HASP, LPG, CPc, elongation factor-2 (elF-2), enolase, aldolase, triose phosphate isomerase (TPI), protein disulfide isomerase (PDI), or p45. In aspects, Leishmania Ag(s) comprise AARS(s) from or that are related to AARS(s) of Leishmania LACK, NH36, KMP-11, gP63, LmIRAB, H2B, CPa, or Cpb PPTs or combinations. Such PPTs are described in, e.g., Sundar S, et al. Expert Rev Vaccines. 2014; 13(4):489-505. doi:10.1586/14760584.2014.894467. Known and predicted Ags and epitopes against Leishmania species are known in the art and described in E Silva R F et al. Front Immunol. 2020; 10:3145. Published 2020 Feb. 14. doi:10.3389/fimmu.2019.03145; Zhang J et al. PLoS One. 2020; 15(3):e0230381. Published 2020 Mar. 16. doi:10.1371/journal.pone.0230381; Palatnik-de-Sousa C B. Front Immunol. 2019; 10:813. doi:10.3389/fimmu.2019.00813; Hamrouni S et al. PLoS Negl Trop Dis. 2020; 14(3):e0008093. doi:10.1371/journal.pntd.0008093; jaya Kumar et al. https://doi.org/10.3389/fimmu.2017.01763, Front. Immunol., 2017; Das et al., Science Translational Medicine, 2014: 234RA56; Kashyap M et al. Infect Genet Evol. 2017; 53:107-115. doi:10.1016/j.meegid.2017.05.022; Alves-Silva M V et al. doi:10.3389/fimmu.2017.00100. Front Immunol. 2017; 8:100. In aspects, OSMA of the Leishmania epitope(s) are THIEs. Examples of such epitopes are known in the art (SFE Joshi S et al. Front Immunol. 2019; 10:288. doi:10.3389/fimmu.2019.00288). Such Ag(s)/epitopes can be adapted for AgES(s) or can be modified to form AgV(s), PE(s), and the like, or associated with ITS(s), such as polyUb(s), or both. In aspects, CEPESCs comprise PCRA(s) or CRA(s) related to NVNBOs, such as Leishmania. Examples of bioinformatics epitopes that can be used in such approaches are described in Bordbar A et al. Infect Genet Evol. 2020; 80:104189. doi:10.1016/j.meegid.2020.104189.

[1017] In aspects, delivery of EA(s) of Leishmania AgES CEPESCs result in anti-Leishmania IR(s). In aspects, such IR(s) include DOS increases in the production of IL-12, IFN-γ, or both. In aspects, IR(s) comprise an increase in the number or activity of IC(s), such as Leishmania Ag-specific T-cells, B cells, or both. In aspects, IR(s) comprise increased anti-Leishmania innate immune cell or innate trained immune cell activity (e.g., enhanced macrophage activity). In aspects, IR(s) include enhanced anti-Leishmania memory immune responses, such as an increase in the number of memory T cells specific for Leishmania Ag(s) (e.g., DOS increases in Leishmania Ag-specific CD4+ and CD8+ central memory T cells). In aspects, IR(s) lead to DOS CE(s) such as reduction in lesions, reduction in visceral disease, reduction in Leishmania-related fatalities, and reduction of Leishmania-related symptoms, such as weight loss, enlarged spleen or liver, prolonged fever, and the like.

[1018] In AOTI, CEPs comprise Ag(s) against malaria-associated DCA Ags, e.g., Plasmodia falciparum PPTs, such as RTS, S, and TRAP (SFE WO9310152). Other plasmodia Ags that can be in CEPs include P. faciparum MSP1, AMA1, MSP3, EBA, GLURP, RAP1, RAP2, Sequestrin, PfEMP1, Pf332, LSA1, LSA3, STARP, SALSA, PfEXP1, Pfs25, Pfs28, PFS27/25, Pfs16, Pfs48/45, or Pfs230 PPTs/AARSs and their analogues in Plasmodium spp. The Plasmodium falciparum Ag can include the circumsporozoite (CS) antigen. In aspects, Ag(s) can include P. falciparum PPTs CS, LSA1, TRAP, CeITOS (Ag2), and Amal. In AOTI, Ag(s) comprise CSP PPT(s) or FF/FV thereof. Such PPTs are described in U.S. Pat. No. 8,470,560. In AOTI, Ag(s) comprise highly conserved AARS(s). In AOTI, Ag(s) are cross-reactive against 2+ strains or species of pathogen.

[1019] In aspects, delivery of an AE of CEPESC(s) DOS induces IR(s), CE(s), or both against NVNBO(s) in TR(s). In aspects, such methods treat or treat the symptoms of diseases such as amoebiasis, giardiasis, trichomoniasis, African Sleeping Sickness, American Sleeping Sickness, leishmaniasis (Kala-Azar), balantidiasis, toxoplasmosis, malaria, acanthamoeba keratitis, and babesiosis. In aspects, such methods treat diseases or conditions associated with parasitic infections, e.g., acanthamoeba keratitis, amoebiasis, ascariasis, babesiosis, balantidiasis, baylisascariasis, chagas disease, clonorchiasis, cochliomyia, cryptosporidiosis, diphyllobothriasis, dracunculiasis, echinococcosis, elephantiasis, enterobiasis, fascioliasis, fasciolopsiasis, filariasis, giardiasis, gnathostomiasis, hymenolepiasis, isosporiasis, katayama fever, leishmaniasis, lyme disease, malaria, metagonimiasis, myiasis, onchocerciasis, pediculosis, scabies, schistosomiasis, sleeping sickness, strongyloidiasis, taeniasis, toxocariasis, toxoplasmosis, trichinosis, and trichuriasis.

[1020] In aspects, a CEP comprises fungi-associated Ag(s) (fungal Ag(s)). In aspects, a CEP comprises Ag(s) associated with or related to PPTs of a fungi of an Aspergillus species, Blastomyces dermatitides, Candida yeasts (e.g., Candida albicans), Coccidioides, Cryptococcus neoformans, Cryptococcus gattii, dermatophyte, Fusarium species, Histoplasma capsulatum, Mucoromycotina, Pneumocystis jirovecii, Sporothrix schenckii, Exserohilum, or Cladosporium. In aspects, CEP(s) comprise Ag(s) that are of or related to PPT(s)/AARS(s) expressed in Aspergillus, Coccidoides, Cryptococcus, Coccidioides immitis, Candida Nocardia, Candida albican, Pneumocystis, and Chlamydia. In aspects, Ag(s) comprise AARS(s) of or related to PPT(s) expressed in Ascomycota (e.g., Fusarium oxysporum, Pneumocystis jirovecii, Aspergillus spp., Coccidioides immitis/posadasii, Candida albicans), Basidiomycota (e.g., Filobasidiella neoformans, Trichosporon), Microsporidia (e.g., Encephalitozoon cuniculi, Enterocytozoon bieneusi), and Mucoromycotina (e.g., Mucor circinelloides, Rhizopus oryzae, Lichtheimia corymbifera). In aspects, CEPs comprise Ag(s) associated with dermatophytic fungi or keratinophilic fungi.

[1021] In aspects, TCE(s) in such CEPs CPCGCOSCOCO TH17Es.

[1022] In aspects, CEPESCs comprising fungal Ag(s) induce anti-fungal IRs, such as DOS increase in the number/activity of anti-fungal-specific T-cells or BCs or DOS proliferation or activity enhancement in ITICs, such as DCs, NKCs, or CT. In aspects, such IR(s) result in CE(s), such as DOS reduction in fungal spores, or DOS reduction in the cause or conditions of associated fungal infections, such as aspergilloses, blastomycosis, candidasis, coccidioidomycosis, cryptococcosis, histoplasmosis, mycetomas, paracoccidioidomycosis, and tinea pedis. Anti-fungal CEPESCs can comprise any components of CEPESCs described herein, such as ITII(s), CI(s) (including NGDCI(s)), NANCIPI(s) and the like. ES(s) can comprise EEI(s) and can be in TFA-associated NAVs.

### ii. Cancer Ags & Epitopes

[1023] In a further aspect, CEPESCs comprising cancer AgES(s) are provided. Numerous aspects of cancer are described here and the methods-related portions of this Detailed Description, infra. In general, any of the aspects, principles, and methods described in either section or in any other related section of this disclosure can be applied to the practice of the invention (e.g., incorporated in CEPESC methods or compositions).

[1024] Cancer AgES CEPESCs can comprise any suitable number of cancer AgES(s) from any suitable type of cancer(s). Terms such as “cancer” are understood in the art and, accordingly, described herein only in a non-limiting and illustrative manner. In general, cancer refers to a disease condition in which abnormal cells divide without control. The term tumor typically is used to describe detectable collections of cancer cells. Other aspects of cancers are discussed elsewhere in this disclosure and in the art.

[1025] Historically, cancers were named for/classified by the organ or type of cell in which they tended to initiate. E.g., cancer that begins in the colon is traditionally called “colon cancer” and cancer that begins in melanocytes of the skin is called melanoma. Such classifications were made previously with little or no consideration of molecular pathology or immunobiology of the particular described tumor or cancer. Accordingly, there has been increasing scrutiny into the historical organ-of-origin/cell-of-origin classification of cancers and efforts to improve on such classification, including the WHO Classification of Tumours and the Cancer Genome Atlas project (SFE Li Y et al. BMC Genomics. 2017; 18(1):508. Published 2017 Jul. 3. doi:10.1186/s12864-017-3906-0). Recently, it has been demonstrated that cell-of-origin typically remains one of, if not the most, dominant indicator of cancer typing considering a number of molecular factors (e.g., DNA-methylation-based clustering) (SFE Hoadley K A et al. Cell. 2018; 173(2):291-304.e6. doi:10.1016/j.cell.2018.03.022). Accordingly, traditional cancer classifications continue to be valid. Moreover, such classifications continue to be widely used in the art. Accordingly, both types of classifications are used in this disclosure. Any classification based on organ-of-origin or cell-of-origin will generally apply to any subclassification of cancers identified in association with such cancers. Such generalizations may be determined to only apply to some subtypes of such cancers as may be later determined through experimentation or findings (e.g., bladder cancer is associated with several different subtypes of cancer based on molecular classifications). One finding of such new approaches is actually that many cancers of different organ-of-origin and cell-of-origin type share similar molecular and other characteristics. Accordingly, application of methods/Ag(s) to a particular type of cancer described herein can be also be applied to cancers having similar molecular properties, immunological properties, or both, as a cancer identified by organ-of-origin or cell-of-origin.

[1026] In aspects, cancer Ag(s) (or “cAg(s)”) in CEPs are from or related to C1-LUAD-enriched cancer cell PPTs; C2-Squamous-like cancer cell PPTs; C3-BRCA/Luminal cancer cell PPTs; C4-BRCA/Basal cancer cell PPTs; C5-KIRC cancer cell PPTs; C6-UCEC cancer cell PPTs; C7-COAD/READ cancer cell PPTs; C8-BLCA cancer cell PPTs; C9-OV cancer cell PPTs; C10-GBM cancer cell PPTs; or C13-AML cancer PPTs; or combinations. The relevant molecular characterization of such cells is described in, e.g., Hoadley K A et al. Cell. 2014; 158(4):929-944. doi:10.1016/j.cell.2014.06.049.

[1027] In aspects, cAg(s) in CEPs are from cancer cells immunologically classified as type C1 (wound healing) cancer cells (e.g., occurring frequently in colorectal cancer, lung squamous cell carcinomas, breast carcinoma, head and neck carcinoma and chromosomally unstable gastrointestinal cancer); type C2 (IFN-γ dominant) cancer cells (associated frequently with gastric, ovarian (OV), HNSC, and cervical tumors (CESC)); type C3 (Inflammatory) cancer cells, associated frequently with kidney, prostate, and pancreatic cancers, and papillary thyroid carcinomas; type C4 (Lymphocyte Depleted) cancer cells (associated with adrenocortical carcinoma (ACC), pheochromocytoma and paraganglioma (PCPG), hepatocellular carcinoma (LIHC), and gliomas) type C5 (Immunologically Quiet) cancer cells frequently associated with lower grade gliomas (LGGs); type C6 (TGF-β Dominant) cancer cells; and CT. Such immunological classification is described in Thorsson V et al. 2019 20; 51(2):411-412 & Immunity. 2018; 48(4):812-830.e14. doi:10.1016/j.immuni.2018.03.023

[1028] In aspects, cAg(s) are associated (are from/related to and induce IR(s) against) carcinoma cells/cancers (e.g., adenocarcinoma, basal cell carcinoma, squamous cell carcinoma, and transitional cell carcinoma). In aspects, cAg(s) are associated with sarcoma cells/cancers. In aspects, cAg(s) are associated with leukemia (e.g., lymphoblastic leukemia). In aspects, cAg(s) are associated with a myelodysplastic syndrome cancer (e.g., acute myeloid leukemia (AML)). In aspects CAg(s) are associated with choriocarcinoma, chronic lymphocytic leukemia (CLL), chronic myeloid leukemia (CML), Hodgkin lymphoma, myeloma, melanoma, mesothelioma, non-Hodgkin lymphoma (NHL), soft tissue sarcoma or other sarcoma (e.g., an angiosarcoma or chondrosarcoma), glioblastoma, neuroblastoma, glioma, blastoma, gestational trophoblastic tumour (GTT), blastic plasmacytoid dendritic cell neoplasm, acral lentiginous melanoma, actinic keratoses, acute lymphocytic leukemia, adenoid cystic carcinoma, adenomas, anorectum cancer, astrocytic tumor, bartholin gland carcinoma, bronchial gland carcinoma, carcinoid, cholangiocarcinoma, chondosarcoma, choriod plexus papilloma/carcinoma, chronic lymphocytic leukemia, clear cell carcinoma, cystadenoma, endodermal sinus tumor, endometrial hyperplasia, endometrial stromal sarcoma, endometrioid adenocarcinoma, endothelial cell cancer, ependymal cancer, epithelial cell cancer, Ewing's sarcoma, eye and orbit cancer, female genital cancer, focal nodular hyperplasia, gastric antrum cancer, gastric fundus cancer, gastrinoma, glioblastoma, glucagonoma, hemangiblastomas, hemangioendothelioma, hemangiomas, hepatic adenoma, hepatic adenomatosis, hepatobiliary cancer, hepatocellular carcinoma, insulinoma, intaepithelial neoplasia, interepithelial squamous cell neoplasia, intrahepatic bile duct cancer, jejunum cancer, Kaposi's sarcoma, leiomyosarcoma, lentigo maligna melanomas, lymphoma, male genital cancer, malignant melanoma, malignant mesothelial tumors, medulloblastoma, medulloepithelioma, meningeal cancer, mesothelial cancer, metastatic carcinoma, mucoepidermoid carcinoma, multiple myeloma, neuroepithelial adenocarcinoma nodular melanoma, non-epithelial skin cancer, non-Hodgkin's lymphoma, oat cell carcinoma, oligodendroglial cancer, osteosarcoma, papillary serous adenocarcinoma, plasmacytoma, pseudosarcoma, pulmonary blastoma, renal cell carcinoma, retinoblastoma, rhabdomyosarcoma, sarcoma, small cell carcinoma, serous carcinoma, somatostatin-secreting tumor, submesothelial cancer, superficial spreading melanoma, T cell leukemia, verrucous carcinoma, VIPoma, uterine cervix cancer, uterine corpus cancer, uveal melanoma, Wilms tumor, or hairy cell leukemia.

[1029] In aspects, cAg(s) are associated with cells of anal cancer (including anal canal cancer), bile duct cancer, bilary tract cancer, bladder cancer, bone cancer, bone marrow cancer, bowel cancer, brain tumor, breast cancer, cervical cancer, CNS cancer, colon cancer, connective tissue cancer, colorectal cancer, colon cancer, endometrial cancer, eye cancer, digestive system cancer, duodenum cancer, endocrine system cancer, gallbladder cancer, gastric cancer, glial cancer, head and neck cancer, heart cancer, ileum cancer, joint cancer, kidney cancer, large intestine cancer, laryngeal cancer, liver cancer, lung cancer (e.g., small-cell lung cancer or non-small cell lung cancer), mouth or oropharyngeal cancer, muscle cancer, nasal and sinus cancers, nasopharyngeal cancer, nasal tract cancer, esophageal cancer, ovarian cancer, pancreatic cancer, parotid cancer, penile cancer, pituitary cancer, prostate cancer, pharynx cancer, renal cancer, rectal cancer, respiratory system cancer, salivary gland cancer, skin cancer (e.g., non-melanoma skin cancer), sinus cancer, small intestine cancer, stomach cancer, testicular cancer, tongue cancer, thyroid cancer, uterine cancer, urehtra cancer, ureter cancer, vaginal cancer, vulval cancer, cancer of the peritoneum, hepatocellular cancer, gastric or stomach cancer (including gastrointestinal cancer), cervical cancer, ovarian cancer, liver cancer, bladder cancer, hepatoma, breast cancer, colon cancer, colorectal cancer, endometrial or uterine carcinoma, salivary gland carcinoma, kidney cancer (e.g., renal cell carcinoma), liver cancer, prostate cancer, vulval cancer, thyroid cancer, hepatic carcinoma, anal carcinoma, penile carcinoma, melanoma, and various types of head and neck cancer.

[1030] cAg(s) can be AW non-Hodgkin's lymphoma, e.g., B-cell lymphoma(s) or T-cell lymphoma(s), e.g., diffuse large B-cell lymphoma, mediastinal B-cell lymphoma, follicular lymphoma, small lymphocytic lymphoma, mantle cell lymphoma, marginal zone B-cell lymphoma, extranodal marginal zone B-cell lymphoma, nodal marginal zone B-cell lymphoma, splenic marginal zone B-cell lymphoma, Burkitt lymphoma, lymphoplasmacytic lymphoma, hairy cell leukemia, CNS lymphoma, precursor T-lymphoblastic lymphoma, peripheral T-cell lymphoma, cutaneous T-cell lymphoma, angioimmunoblastic T-cell lymphoma, extranodal natural killer/T-cell lymphoma, enteropathy type T-cell lymphoma, subcutaneous panniculitis-like T-cell lymphoma, anaplastic large cell lymphoma, or peripheral TC lymphoma).

[1031] In AOTI, cAg(s) are AW PPT(s) from cancer cells CB the expression of cancer cell marker(s). In AOTI, such cancer cell marker(s) include CD123: CD2, CD19, CD20, CD30, CD38, CD40, CD52, CD70, EGFR/ERBB1, IGF1R, HER3/ERBB3, HER4/ERBB4, MUC1, TROP2, cMET, SLAMF7, PSCA, MICA, MICB, TRAILR1, TRAILR2, MAGE-A3, B7.1, B7.2, CTLA4, and PD1.

[1032] In AOTI, the FP lacks the K9Melapoly PE. In aspects, the FP lacks any canine melanoma Ags, any canine TAA(s), or any melanoma Ags.

[1033] In aspects, cAg(s) are associated with solid tumor cancer cells. In aspects, cAg(s) are associated with non-solid-tumor cancer cells (e.g., a blood cancer, non-tumor-forming breast cancer, or liquid tumor cancer).

### a. Cancer Antigen/Epitope Types

[1034] In aspects, cAgs comprise TCE(s). In aspects, TCE(s) comprise MHCIE(S), MHCIIE(s), or both. In aspects, TCE(s) comprise both MCHIE(s) and MHCIIE(s). In aspects, TCE(s) comprise more than 3 TCE(s). In aspects, OSMOA of the TCE AARS(s) in the CEP are at least 15 AAs, at least 18 AAs, or at least 20 AAs in length. In aspects, OSMOA shorter TCE(s) are associated with upstream or downstream flanking sequences. In aspects, SMOA TCE(s) are TH1 TE(s). In aspects, OOS TCE(s) are T17 TE(s). In aspects, OSMOA cAg(s) comprise BCE(s). In aspects, CEPs lack DCA-associated BCE(s).

[1035] cAg(s) can comprise any suitable number of cancer Ag(s) classified into any OOM suitable cancer Ag classification(s). In aspects, cAg(s) comprise AARS(s) of or related to PPT(s) over expressed in cancer cells, expressed in association with cancer-causing DCA(s), or both. In aspects, OSMOA cAg(s) in a CEP comprise tumor-associated antigen(s) (TAA(s)). In aspects, OSMOA cAg(s) comprise cancer testis Ag(s)-CTA(s)/cancer germline Ag(s)-CGA(s)) (e.g., MAGE-A1, NY-ESO-1, and SSX-2 Ag(s)). In aspects, OSMOA cAg(s) in a CEP comprise viral cancer-associated Ag(s) (VCAA(s)). In aspects, OSMOA cAg(s) in a CEP comprise tumor-specific Ag(s) (TSA(s) or Ag(s) classified as neoantigen(s) (NA(s)) (or Ag(s) classifiable as either). In aspects, OSMOA cAg(s) in a CEP are oncoprotein Ag(s). In aspects, cAg(s) comprise a mixture of two or more of such Ag types (e.g., 3 or more such Ag types). In aspects, cAg(s) comprise OOM TAA(s) and OOM TSA(s)/NA(s). In aspects, OSMOA TSA(s)/NA(s) in a CEP are shared (public) NA(s) (SNA(s)).

[1036] In aspects, OSMOA cAg(s) of a CEP are related to differentiation antigens (e.g., Gp100, Melan-A/Mart-1, and Tyrosinase). In aspects, OSMOA cAg(s) in a CEP are oncofetal Ag(s) (e.g., carcinoembryonic antigen (CEA)). In aspects, OSMOA cAg(s) are antiapoptotic proteins (e.g., livin and survivin), hTERT, or a tumor suppressor proteins (e.g., p53). In aspects, OSMOA cAg(s) of a CEP are mimotopes of tumor-associated carbohydrate antigens (TACAs). In aspects, cAg(s) comprise CTs of these or other cAg(s) DEH.

[1037] In AOTI, OSMOA cAg(s) of a CEP are xenogenetic Ag(s), comprising sequences CPCGCOSCO or CO an AARS of or associated with homolog of OOM of the CAg(s) described here in a TR (e.g., an CAg comprising an AARS of a CAg from a NHA cancer that is a human homolog of a human cancer CEA, MAGE, or Tyrosinase). In AOTI, OSMOA CAg(s) are hybrid/chimeric xenogenetic Ag FPs comprising both TR-endogenous CAg-related AARS(s) and xenogenetic (other species) AARS(s) from related homolog(s). In aspects, such a CAg(s) exhibits DOS IR(s) (e.g., MHCII Ag presentation) than the corresponding human or non-FP counterpart cAg (in the same context). The use of xenogenetic Ag(s) is not limited to cancer, however, and can be applied to any type of CEP described in this disclosure (e.g., viral AgES CEPESCs).

[1038] In aspects, a CEP comprises synthetic epitope(s) in combination with CAg(s). In one exemplary aspect, the synthetic epitope is the pan DR epitope (PADRE). This aspect can be applied to other types of CEPESCs described in this disclosure (e.g., viral Ag CEP(s)).

[1039] In aspects, CAg(s) comprise a mix of immunodominant & unconventional epitopes. In aspects, such a mix is delivered by associated but separate administration of CEPESCs or CEPESC(s) and other AgES NAM compositions (e.g., a 2nd composition comprising a NGDICRTS-Ag FP, such as a DEC-205-binding domain/Ag FP). In AOTI, most, generally all, substantially all, or all of the CAg(s) in a CEP exhibit a DOS in a significant number of TR(s). In aspects, such CEP(s) comprise a collection of CAg(s) selected for control of immunodominance, comprise CAgV(s) modified for reduced immunodominance, or both. In AOTI, CAg(s) comprise unnatural immunity epitope(s).

[1040] In aspects, CAg CEPs comprise PE(s). In aspects, PE(s) comprise FL(s), MSL(s), MSFL(s), SCSs, or CT. In aspects, gDFPAg(s) comprise PE(s).

[1041] In aspects, OSMOA CAg(s) of a CEP are associated with ITS(s), e.g., PTPS(s), e.g., polyUb(s). In aspects, CAg(s) are AW non-PTPS ITS(s).

[1042] In aspects, OSMOA CAg(s) comprise antigen recognition/presentation facilitating sequences (ARPFS(s)). In aspects ARPFS(s) comprise HSP(s), MHC(s), or both. In aspects, CAg CEPs comprise OOM ES(s) coding for anti-cancer PPT(s) or AARS(s), such as anti-angiogenic factor(s), e.g., anti-VEGF PPT(s). In aspects, CAg CEP(s) comprise anti-cancer Ab PPTs (e.g., Ab FPs or other Ab PPTs). In aspects, CEPs lack Ab AARS(s).

[1043] CAg(s) are KITA. Relevant teachings concerning such antigens and other compositions, methods, techniques, and principles relevant to and can be adapted to combine/incorporate in these aspects of the invention are described in, e.g., Luo W et al. Cancer Cell Int. 2020; 20:66. Published 2020 Mar. 4. doi:10.1186/s12935-020-1147-9; Curran M A et al. Annu Rev Med. 2019; 70:409-424. doi:10.1146/annurev-med-050217-121900; Maeng H M et al. F1000Res. 2019; 8:F1000 Faculty Rev-654. Published 2019 May 13. doi:10.12688/f1000research.18693.1; Pender A et al. Cancers (Basel). 2018; 11(1):1. Published 2018 Dec. 20. doi:10.3390/cancers11010001; Lee S H et al. Hum Vaccin Immunother. 2015; 11(8):1889-1900. doi:10.1080/21645515.2015.1035502; Buonaguro L, et al., Clinical and Vaccine Immunology January 2011, 18 (1) 23-34; DOI: 10.1128/CVI.00286-10; Lopes, A et al. J Exp Clin Cancer Res 38, 146 (2019). https://doi.org/10.1186/s13046-019-1154-7; New Strategies to Improve Therapeutic Vaccines (Seyyed Shamsadin Athari Ed.) (2018) (DOI: 10.5772/intechopen.71636/ISBN: 978-1-78923-509-8) (e.g., the chapter by Yu, C. et al., DOI: 10.5772/intechopen.74900); Pan R Y et al. J Immunol Res. 2018; 2018:4325874. Published 2018 Dec. 19. doi:10.1155/2018/4325874; Terbuch A et al. Vaccines (Basel). 2018; 6(3):52. Published 2018 Aug. 9. doi:10.3390/vaccines6030052; Yamamoto, T. N., e tal. Nat Med 25, 1488-1499 (2019). https://doi.org/10.1038/s41591-019-0596-y; and Hollingsworth R E et al. NPJ Vaccines. 2019; 4:7. doi:10.1038/s41541-019-0103-y.

[1044] Examples of CAg(s) KITA suitable for expression in CEP(s) include Her2/Neu CAgs; abnormally expressed PPT CAgs (e.g., MAGE-A3, BAGE, AFP, XAGE-1B, mesothelin, PRAME, or Muc-1); melanoma-associated CAgs (e.g., Mart-1, GP-100, tyrosinase-related protein 1, tyrosinase-related protein 2, etc.); prostate cancer-associated CAgs (e.g., PSA, PAP, and PSMA); & B cell leukemia/lymphoma-associated CAgs (Ig gamma or Ig kappa). CAg(s) can fall within both these & other classifications (e.g., tyrosinase is a melanoma-associated CAg and survivin and NY-ESO are abnormally expressed PPTs).

[1045] To further illustrate these aspects, types of CAg(s) are described briefly in further detail in a non-limiting manner in the following sections. It will be clear from such description that these CAg(s) can be combined in any suitable manner in CEPs and that there can be overlap in the various classifications that follow or precede this paragraph.

### 1) Viral Cancer Antigens

[1046] In aspects, OSMOA CAg(s) of a CEP are VCAA(s). VCAAs typically arise from oncogenic viral PPTs, and, accordingly, also can be classified as oncoproteins (other oncoproteins are discussed below). Readers will recognize that there also can be overlap between viral pathogen Ag(s) and VCAA(s) (i.e., in one aspect a CEP comprises OOM Ag(s) that can be classified both as anti-viral Ag(s) and VCAA(s), as in the case of HPV Ag(s)). In aspects, a VCAAgES CEPESC induces DOS IR(s) against an oncogenic virus. In aspects, delivery of an EA of a VCAAgES CEPESC induces DOS reduction in viral neoplasia(s).

[1047] Well-studied VCAAs include the HPV E6/E7 PPTs. In aspects, CEP(s) comprise one or both type of Ag(s). In aspects, OSMOA CAg(s) in a CEP are HPV16 VCAA(s), HPV18 VCAA(s), or a combination (E6, E7, or other Ag(s)). In aspects, HPV AgES CEPESCs can be characterized in that (a) HPV Ag(s) in the CEP are associated with PTPS(s); gDSS, mGDS(s), AgV(s) (e.g., GSRV Ag(s), such as a GSRV EP7, e.g. SEQ ID NO:716 or a FF/FV); (b) the CEP comprises or is delivered in association with ITII(s) (e.g., hEAT-2 or a FF or FV); (c) are expressed from NAV(s) (e.g., mRNA(s) or CaPNP-associated plasmid(s)); are expressed from multiple NAM(s); (d) comprise HPV Ag PE(s) comprising MSL(s), FL(s), or MSFL(s), self-cleavage site(s), or combinations; or (e) comprise a combination of two or more of any aspect of (a)-(d). In aspects, HPV AgES CEPESC(s) comprise OOM aspects of at least three of (a)-(d). In aspects, HPV AgES CEPESCC(s) comprise OOM aspects of all four of (a)-(d). In aspects, an HPV Ag CEP comprises capsid protein L2 Ag(s). In aspects, OOM of such HPV AgES CEPESCs exhibit DOS improved IR(s) as compared to gDAgFP(s) comprising HPV Ag(s) described in the Wistar Art. In aspects, the improved IR comprises enhanced memory immunity effect(s). In aspects, delivering an EA of OOM of such HPV AgES CEPESC(s) results in DOS reduction in HPV associated cervical carcinomas; HPV-positive head and neck cancers; or both. In aspects, TR(s) treated with such HPV AgES CEPESC(s) have not been exposed to HPV. In aspects, TR(s) have been diagnosed with a premalignant HPV-associated disease such as cervical intraepithelial neoplasia (CIN) or vulvar intraepithelial neoplasia (VIN) and the delivery of an EA of the CEPESC DOS reduces progression of such conditions to cancer. In aspects, delivery of EA(s) HPV AgES CEPESC(s) induces DOS reductions in HPV-associated cervical intraepithelial neoplasia (CIN), cervical cancer, or head and neck cancer in HPV challenged TR(s) or HPV-infected TR(s).

[1048] In aspects, CEPs comprise Merkel cell carcinoma virus (MCCV) (Merkel Cell Polyoma virus) Ag(s). In an aspect, CAg(s) comprise MCCV large T Ag(s), small T Ag(s), or combinations. In AOTI, EA(s) of such CEPESC(s) DOS induces CE(s) against or treats/prevents Merkel cell carcinoma(s) in TR(s).

[1049] In aspects, CEPs comprise human T lymphotropic virus-1 (HTLV-1) Ag(s). In aspects, a CEP comprises HTLV-1 tax PPT Ag(s). In aspects, delivery of EA(s) of related CEPESC(s) induce CE(s) against or treats or prevents HTLV-1-associated neoplastic transformation, spastic paresis induction, or both.

[1050] In aspects, a CEP comprises EBV Ag(s). In aspects, a CEP comprises EBV EBNA-1, EBV LMP2, or a combination thereof. In aspects, delivery of an EA of such CEPESC(s) DOS treats or prevents EBV-associated nasopharyngeal carcinoma, Burkitt's lymphoma, or both.

[1051] In aspects, a CEP comprises CVM Ag(s). In aspects, a CEP comprises polyomavirus Ag(s) (e.g., middle T (mT) oncoprotein Ag(s)).

[1052] In AOTI, CEPs comprise human herpesvirus 8 (HHV-8) (KSV) Ag(s). In aspects, delivery of EA(s) of an HHV-8 AgES CEPESC(s) prevents or treats Kaposi's sarcoma (KS) or a HHV-8-associated lymphoproliferative disorder (e.g., primary effusion lymphoma and multicentric Castleman's disease).

[1053] In aspects, an anti-cancer CEPESC comprises HBV Ag(s), HCV Ag(s), or both. In aspects, TR(s) receiving such CEPESCs are pre-cancerous or have not been exposed to the indicated DCA and the delivery of an EA of CEPESC(s) DOS reduces the inflammatory tissue environment in virus-infected TR(s) or TR(s) subsequently challenged with such viruses.

### 2) TAAs and CGAs

[1054] In aspects, CEPs comprise TAA(s)/CGA(s). TAA/CGA CEP(s) can include any suitable number and type of TAA/CGA. In aspects, OSMA CAg(s) of a CEP are differentiation TAA(s) (e.g., PSA, mammaglobin-A, or tyrosinase). In aspects, OSMA CAg(s) of a CEP are overexpression Cag(s) (e.g., HER2 and TERT). In aspects, OSMA CAg(s) of a cEP are CGA(s) (e.g., MAGE or BAGE). In aspects, OSMA CAg(s) of a CEP are oncofetal CAg(s) (e.g., CEA or TPBG). In aspects, CAg(s) of a CEP comprise 2, 3, or 4 of such Ag types.

[1055] Several TAAs are known and can be incorporated into CEPs (including examples provided above). Well-studied TAAs include CEA, MAGE Ags (e.g., MAGE-A Ags), and MUC Ags. In aspects, such Ag(s) are incorporated in CEP(s) or FFs or FVs thereof are incorporated into CEPs.

[1056] In aspects, a CEP comprises MAGE CAg(s) (e.g., MAGE-1, MAGE-3, MAGE-4, MAGE-12, or other MAGE Ag(s) (see e.g., WO99/40188).

[1057] In aspects, a CEP comprises prostate cancer CAg(s). Examples of such CAg(s) include prostate specific antigen (PSA), PAP, PSCA (PNAS 95(4) 1735-1740 1998), PSMA; Prostase (Prostase Ag(s) are described in, e.g., P. Nelson et al. Proc. Natl. Acad. Sci. USA (1999) 96, 3114-3119; Ferguson, et al. (Proc. Natl. Acad. Sci. USA 1999, 96, 3114-3119; WO 98/12302; WO 98/20117; and WO 00/04149); P501S (SEQ ID NO:113 of WO98/37814); PS108 (WO 98/50567); STEAP (PNAS 96 14523 14528 7-12 1999); and Ag(s) described in WO98/37418 and WO/004149. Additional prostate CAg(s) and related PMCs ATAOTI are described in Zahm C D et al. Pharmacol Ther. 2017; 174:27-42. doi:10.1016/j.pharmthera.2017.02.016; Michael A, et al. Expert Rev Vaccines. 2013; 12(3):253-262. doi:10.1586/erv.13.27; & Laccetti doi:10.1097/MOU.0000000000000433. Curr Opin Urol. 2017; 27(6):566-571.

[1058] In other aspects, a CEP comprises AARS(s) of or related to Plu-1 Ag(s) (J Biol. Chem 274 (22) 15633-15645, 1999), HASH-1 Ag(s), HasH-2 Ag(s), Cripto Ag(s) (Salomon et al Bioessays 199, 21 61-70, U.S. Pat. No. 5,654,140) Criptin Ag(s) (e.g., U.S. Pat. No. 5,981,215), tyrosinase, and survivin. In aspects, CEP(s) comprise CAg(s) of or related to Muc-1, Muc-2, EPCAM, her 2/Neu, Wilms tumor-1 (WT-1/WT1), mammaglobin (U.S. Pat. No. 5,668,267) or those disclosed in WO/00 52165, WO99/33869, WO99/19479, WO 98/45328. Additional CAg(s) of which sequences or related sequences can be incorporated in CEPs include MART, trp, gp100, MUM-1-B (melanoma ubiquitous mutated gene product), HER-2, Ras, PSA BCR-ABL, CASP, CDK, p53, TWI, PAP, telomerase, EGFR, LMP-1, PSMA, PSA, PSCA, tyrosinase, TRP, gpl00, SSX-2, CD19, or CD20. ERG, Androgen receptor (AR) antigen, PAK6 antigen, a Prostate Stem Cell Antigen (PSCA), Stratum Corneum Chymotryptic Enzyme (SCCE) antigen, human telomerase reverse transcriptase (hTERT) antigen, a Proteinase 3 antigen, a Tyrosinase Related Protein 2 (TRP2) antigen, a High Molecular Weight Melanoma Associated Antigen (HMW-MAA), a synovial sarcoma antigen, a X (SSX)-2 antigen, an interleukin-13 Receptor alpha (IL13-R alpha) antigen, a Carbonic anhydrase IX (CAIX) antigen, a p97 melanoma antigen, a KLH antigen, a HSP-70 antigen, a beta-HCG antigen, or a Testisin antigen. In aspects, a CEP comprises PRAME, BAGE, Lage (also known as NY Eos 1) SAGE and HAGE (WO 99/53061) or GAGE (Robbins and Kawakami, 1996, Current Opinions in Immunology 8, pps 628-636; Van den Eynde et al., International Journal of Clinical & Laboratory Research (1997); Correale et al. (1997), Journal of the National Cancer Institute 89, p 293. These and other antigens that can be incorporated or adapted for use in CEP(s) are described in US20190290686, US20190032064, and US20180094071.

[1059] In AOTI, CEP(s) comprise NY-ESO-1 Ag(s) & delivering EA(s) of CEPESC(s) induce DOS IR(s) WRT bladder cancer(s) or treats/prevents BC.

[1060] In aspects, CEPs comprise HER2 Ag(s) & delivering EA(s) of such CEPESC(s) induce DOS IR(s) against breast cancer(s) or treats/prevents it.

[1061] In aspects, a CEP comprises CEA Ag(s) and delivering EA(s) of the related CEPESC(s) induce DOS IR(s) against colorectal cancer(s) or treats it

[1062] In aspects, a CEP comprises WT1 Ag(s) and delivering EA(s) of the related CEPESC(s) induce DOS IR(s) against leukemia, or treats or prevents it

[1063] In aspects, a CEP comprises MART-1, gp100, or tyrosinase Ag(s), or combinations, and delivering EA(s) of the related CEPESC(s) induce DOS IR(s) against colorectal cancer(s) or treats or prevents such cancers.

[1064] In aspects, a CEP comprises pregulated lung cancer (URLC10) epitope peptide Ag and an EA of the related CEPESC induces DOS IR(s) against non-small cell lung cancer(s).

[1065] In aspects, a CEP comprises surviving Ag(s) and an EA of CEPESC induces anti-ovarian cancer IR(s) or treats or prevents ovarian cancer.

[1066] In AOTI, CEPs comprise a MUC1 CA(g) & delivering EA(s) of the such CEPESC(s) induces DOS IR(s) against pancreatic cancer(s) or treats or prevents the disease.

[1067] In aspects, a CEP comprises a MUC2 CA(g) and delivering an EA of the related CEPESC induces DOS IR(s) against prostate cancer or treats or prevents the disease. In aspects such a CEP further comprises additional prostate cancer Cag(s), e.g., PSA Ag(s).

[1068] In AOTI, CEP(s) with Ag(s) that PCGCOSCO or CO TAA Ag(s) are associated with 1 CI or 2+CI(s) (e.g., a NGDCI, such as PD-L1 CI, CD112R CI, CRACC CI, or FAP CI, and a gDS CI), or three CI(s). In aspects, a primarily TAA CEP comprises ITII(s) (e.g., hEAT-2 or a FF or FV). In AOTI, a primarily TAA CEP comprises one or two Cis and ITII(s). In aspects, OSMOA TAA Ag(s) of a CEP are AgV(s). In AOTI, OSMOA TAA AgV(s) are FPs comprising 1+ AARSs that enhance recognition of TAA(s) (e.g., a HSP, viral Ag, bacterial Ag, or synthetic epitope). In AOTI, TAA AgV(s) include AARS(s) of TAA homolog(s).

### 3) Mutational Acis (TSAs and Neoanticiens/Neoepitopes)

[1069] In aspects, CAg(s) of CEPs comprise mutational Ag(s) (a.k.a, mutanome-derived antigens). Mutational Ag(s) are mutated “self-antigens,” typically arising from non-synonymous mutations.

[1070] In aspects, OSMA of the mutational CAg(s) in a CEP are classifiable as tumor specific antigens (TSAs). Typically, non-synonymous mutations generate CAg(s) that are more “specific” in being associated with certain cells, populations, and carcinogenesis processes. Importantly, TSAs are not expressed on normal cells and thus typically do not induce autoimmunity and typically are subject of less tolerance than TAAs (TAAs in contrast often are PPTs that are overexpressed in cancer cells, but also expressed in low levels in normal cells). TSAs are described in, e.g., Hollingsworth R E, et al. NPJ Vaccines. 2019; 4:7. doi:10.1038/s41541-019-0103-y. In aspects, TSA(s) are related to PPTs involved in cancer development (e.g., oncogenes and tumor suppressor genes, such as Ras and Bcr-Abl (such CAg(s) are further discussed below). In aspects, an anti-cancer CEP which PCGCOSCO of CO TSA(s) exhibits DOS reduced autoimmunity effects, detectably reduced tolerance, or both than a comparable product PCGCOSCO TAA(s). The “specificity” of TSA(s) is a relative term, however, as such mutations can occur in several tumors/cancers and sometimes even in normal cells. In aspects, TSAs of a CEP occur in less than about 65%, less than about 50%, or less than about 45% of a population.

[1071] In aspects, OSMOA of the CAg(s) in a CEP are classifiable as neoantigens. Neoantigens are a class of TSAs that similarly arise from mutations which are more common in cancer cells. Neoantigens are highly individual-specific and usually do not involve known oncogenes. Given their individual and highly specific nature neoantigens can often be DOS more effective in inducing anti-cancer IR(s) than TAAs. In an aspect, a neoantigen is present in less than about 2%, less than about 1.5%, less than about 1% of a population, or less than 0.5% of a population; are recognized by less than about 1%, less than about 0.5%, or less than about 0.25% of the T cells in TR(s); or both (before treatment).

[1072] An intermediate class of TSAs are “shared neoantigens” (SNAs) (sometimes also called “public neoantigens”) (SFE Zhao W. et al. Pharmacogenomics. Published Online:19 May 2020. https://doi.org/10.2217/pgs-2019-0184). In an aspect, OSMOA of the CAg(s) in a CEP are classifiable as shared neoantigens. In aspects, shared neoantigens are present in between about 1-30%, 1.5-30%, 2-30%, 1-25%, 1.5-25%, 2-25%, 1-20%, 1.5-20%, or about 2-20% of a population; are recognized by 5%:5, 2.5%5, or less than ˜1% of T-cells in TR(s) or both (before treatment).

[1073] Examples of known SNA epitopes include KQMNDARHG (SEQ ID NO:741) associated with breast cancer cells, LSKITEQEK (SEQ ID NO:742), and STRDPLSKI (SEQ ID NO:743). These and other SNA(s) are described in Wood, M. A et al. BMC Cancer 18, 414 (2018). https://doi.org/10.1186/s12885-018-4325-6. Other examples of neoantigens/SNA(s) include BRAF V600E (Liu Q et al. Cancer Immunol. Immunother. 2018; 67:299-310. doi: 10.1007/s00262-017-2079-7) and KRAS G12D (Chaft J. E. Clin. Lung Cancer. 2014; 15:405-410. doi: 10.1016/j.cllc.2014.06.002). Additional neoantigens are the frameshift peptide (FSP) neoantigens available through Creative Biolabs (Shirley, N.Y., USA—https://www.creative-biolabs.com/vaccine/fsps-based-cancer-vaccine.htm). Muti-neoantigen PEs have been described by D'Alise, A. M et al. Nat Commun 10, 2688 (2019). https://doi.org/10.1038/s41467-019-10594-2. Shared neoantigens are also described in Christopher A. J Exp Med 2 Jan. 2018; 215 (1): 5-7. doi: https://doi.org/10.1084/jem.20172188. Numerous additional tumor-specific neoepitopes are defined in WO2016187508 (see Tables 1-9). Any of these TSA(s) can be incorporated into CEP(s) individually, in combination, or in combination with other CAg(s).

[1074] In aspects, OSMOA TSA(s) of a CEP (e.g., SNA(s) or neoantigen(s) of a CEP) are associated with a “driver gene” PPT(s) (i.e., a PPT necessary for tumor survival). Examples of such genes associated with neoantigens/SNA(s) include PIK3CA, FAT4, BRCA2, GNAQ, LRP1B, and PREX2 (SFE Zhou J et al. Biomed Res Int. 2019; 2019:8103142. Published 2019 Jun. 13. doi:10.1155/2019/8103142). In aspects, OSMOA of the CAg(s) of a CEP comprise such driver gene-associated neoantigens/SNA(s).

[1075] In aspects, OSMOA neoantigen(s)/SNA(s) of a CEP are already present in TR(s). In aspects, OSMOA neoantigen(s)/SMA(s) of a CEP are not present in TR(s). In AOTI, a CEP comprises a mix of neoantigen(s)/SMA(s) that are present in a TR prior to delivery of the CEPESC and neoantigen(s)/SMA(s) not present in the individual prior to CEPESC delivery.

[1076] In aspects, CEPs comprise a mix of TAA(s) & TSA(s). In AOTI, a CEP comprises ≥3 CAg(s) including, i.a., 1+ TAA(s) and one or more TSA(s).

[1077] In aspects, CEP(s) comprise TSA(s) associated with mutations in a RAS protein (Kras), p53, or both. In aspects, such CEP(s) comprise microbial antigen(s), viral antigen(s), synthetic antigen(s), or combinations. In aspects, such CEP(s) include neoantigen(s)/SNA(s).

[1078] In aspects, CEP(s) comprise PCRA(s) or CRA(s) that are TSA(s), such as SNA(s). In aspects, the PCRA(s) is from a well characterized cancer, such as a cancer of hematological origin, such as a B cell lymphoma. In aspects, such a TSA comprises a mutated immunoglobulin idiotype (Ig Id) of a B cell receptor (BCR). Such an approach to identifying PCRA TSA(s) is described in Biernacki M et al. Frontiers in Immunology. 11:121 (2020). DOI=10.3389/fimmu.2020.00121.

[1079] In aspects, OSMOA of the TSA(s) of a CEP are from a carcinogen-induced cancer. In aspects, a TSA-ES CEPESC is used to treat such a cancer.

[1080] In aspects, a TSA is an AARS of or associated with PPT(s) expressed in melanoma, lung cancer and bladder cancer cells. In aspects, a TSA is an AARS of or associated with PPT(s) expressed in a tumor associated with DNA mismatch repair defects. In aspects, AARS(s) of or associated with PPT(s) of any such cell type are incorporated in CEP(s) as PCRA(s). In aspects, a CEP comprising any such PCRA(s) or CAg(s) comprises one, two, or more CI(s) (e.g., gDS CI(s); NGDCI(s), such as a PD-L1 CI, CTLA-4 CI, CRACC CI, FAP CI, or CD112R CI, e.g., an Ab, Ab FP, or multimeric trap; or both) and ICSTAP(s)/ICITM(s) (e.g., EAT-2(s), SAP(s), or CT).

[1081] Putative TSA PCRA(s) can be identified through sequencing screening (e.g., DNA or RNA sequencing) focused on finding genomic aberrations that are effectively expressed (e.g., comparing cancer and normal cells using high throughput sequencing, e.g., using whole exon screening); using in silico methods to predict which of the mutations will be presented to T-cells based on proteasome processing and binding affinity to MHC molecules (preferably of the relevant species/population/TR); and testing the identified PCRA(s) in appropriate constructs. Relevant methods for identifying PCRA that are putative TSA(S) and compositions/methods applicable/relevant to the aspects described here are described in Peng, M., et al. Mol Cancer 18, 128 (2019). https://doi.org/10.1186/s12943-019-1055-6; Jiang, T., Shi, T., Zhang, H. et al. J Hematol Oncol 12, 93 (2019). https://doi.org/10.1186/s13045-019-0787-5; and Schumacher T, et al. Annual Review of Immunology (2019) Vol. 37:173-200. https://doi.org/10.1146/annurev-immunol-042617-053402. TSA/neoantigen databases comprising potential PCRA(s) are described in Wu J, et al. Genomics Proteomics Bioinformatics. 2018; 16(4):276-282. doi:10.1016/j.gpb.2018.06.003 and Xiaoxiu Tan et al. Database, Volume 2020, 2020, baaa004, https://doi.org/10.1093/database/baaa004.

### 4) Oncoproteins

[1082] In aspects, CEP(s) comprise oncoprotein(s). Oncoproteins are intended, without limitation, to refer to PPTs that are capable of inducing cell transformation. Oncogenes encoding oncoproteins arise via point mutations, gene amplifications and gene translocations in a normal gene (known as proto-oncogene) and result in altered gene expression or protein activity levels.

[1083] CEP(s) can comprise any suitable number of oncoprotein(s) of any suitable type. In AOTI, OSMOA oncoprotein(s) of CEPs are apoptosis regulators. In aspects, OSMOA oncoprotein(s) of CEPs are cell cycle control proteins. In AOTI, OSMOA oncoprotein(s) of a CEP are cell signaling proteins. In aspects, OSMOA oncoprotein(s) of a CEP are DNA repair proteins. In AOTI, OSMOA oncoprotein(s) of a CEP are growth factors/mitogens (e.g., c-SIS). In aspects, OSMOA oncoprotein(s) of a CEP are growth factor receptors. In aspects, OSMOA oncoprotein(s) of a CEP are transcription factors (e.g., myc).

[1084] In AOTI, OSMOA oncoprotein(s) are receptor tyrosine kinases (e.g., EGFR, PDGFR, VEGFR, or Her2). In AOTI, OSMOA oncoprotein(s) are cytoplasmic tyrosine kinases (e.g., Src-, Syk-ZAP-70-, or BTK- family tyrosine kinases). In AOTI, OSMOA oncoprotein(s) are GTPases (e.g., Ras).

[1085] In AOTI, OSMOA oncoprotein(s) of a CEP are associated with point mutation oncogenes (e.g., P53, RAS, CDC27, or P16). In aspects, OSMOA oncoprotein(s) of a CEP are associated with translocation oncogenes (e.g., BCR-ABL, TEL-AML-1, or PAX-3-FKHR). In aspects, OSMOA oncoprotein(s) in a CEP are associated with overexpressed oncogenes (e.g., P53 or Her-2).

[1086] In exemplary aspects, CEP(s) comprise AARS(s) AW PDGF, ERB-B, ERB-B2, K-RAS, N-RAS, C-MYC, N-MYC, L-MYC, BCL-2, BCL-1, MDM2, BCL-2, tetraspanin oncoprotein CD151, or H-Ras oncoproteins, or CT.

[1087] Oncoproteins also include, but are not limited to, viral proteins from RNA and/or DNA tumor viruses such as hepatitis B viruses, SV40 viruses, polyomaviruses, adenoviruses, herpes viruses, retroviruses and the like. Such viral CAg(s) are discussed above, but their inclusion here reflects that there is overlap in these categories, as there are in other categories of CAg(s).

[1088] In aspects, CEP(s) comprise Ag(s) against proto-oncogene EP(s). Proto-oncogenes include RAS, WNT, MYC, ERK, and TRK. In aspects, the proto-oncogene(s) are associated with a significant risk of cancer development. In an aspect, a proto-oncogene Ag is associated with MYC, which poses a risk of development of Burkitt's lymphoma.

### b. Cancer-Related CRAs and PCRAs

[1089] In aspects, CEP(s) comprise cancer-related CRA(s), PCRA(s), or both. Aspects relating to cancer-associated PCRA(s) and CRA(s) are discussed above as well as here. A number of techniques known useful in the identification/selection of PCRA(s) are known in the art. An example of the application of experimental methods to the identification of a PCRA is described in Huang Y H et al. PLoS One. 2013; 8(6):e64365. doi:10.1371/journal.pone.0064365. Bioinformatics screening approaches are described in, e.g., Nezafat N et al. J Theor Biol. 2014; 349:121-134. doi:10.1016/j.jtbi.2014.01.018; Han K C, et al. Sci Rep. 2020; 10(1):5885. Published 2020 Apr. 3. doi:10.1038/s41598-020-62244-z; and Bachinsky M M et al. Cancer Immun. 2005; 5:6. Published 2005 Mar. 22. Additional examples of CRA/PCRA methods in cancer contexts are exemplified below.

### c. CAg AgVs and Related Sequences

[1090] In aspects, OSMOA of the CAg(s) of a CEP are AgV(s) (CAgV(s)). CEPs can comprise any suitable type of AgV(s). In aspects, OSMOA of CAgV(s) are editopes. In aspects, editope(s) comprise AgV(s) with enhanced MHC binding, enhanced MHC:Ag:TCR binding, or both. In aspects, such AgV(s) comprise affinity-enhancing anchor residue modifications. In aspects, AgV(s) comprise mimotope(s). In aspects, AgV(s) comprise heteroclitic AARS(s). In aspects, AgV(s) comprise DIV(s), such as GLSV(s). Examples of such methods are exemplified in, e.g., references 16, 17, 39, 74, 102, 111, 127, 139, 161, and 181 in Buonaguro, L, et al. Clinical and Vaccine Immunology January 2011, 18 (1) 23-34; DOI: 10.1128/CVI.00286-10 and Castle J. C et al. Cancer Research. 2012; 72(5):1081-1091. doi: 10.1158/0008-5472.CAN-11-3722. In aspects, OSMOA CAg(s) of a CEP are associated with one, two, or more ITS(s) (e.g., polyUb(s) upstream, downstream, or both of OSMOA Ag(s)). In aspects, OSMOA ITS(s) of a CEP are PTPS(s). In aspects, OSMOA of PTPS(s) in a CEP are polyUB(s). In aspects, OSMOA of CAg(s) in a CEP are in PE(s). In aspects, OSMOA CAg(s) in a CEP are in gDAgFP(s).

### c. Additional Features of CAg CEPs and CAgES CEPECs

[1091] In aspects, CAgES CEPs comprise ICSTAP(s) or ICITM(s). In aspects, ICSTAP(s) comprise EAT-2 PPT(s) or AARS(s). In aspects, EAT-2 AARS(s) are hEAT-2, mEAT-2, or FF or FVs of either thereof.

[1092] In aspects, CAgES CEPESC(s) comprise CI(s). In aspects, CI(s) comprise gDS(s) that are CI(s) in TR(s). In aspects, CI(s) comprise NGDCI(s). In aspects, NGDCI(s) comprise PD-L1, PD-1, CRACC, FAP, CTLA-4, LAG-3 CI(s), or CD112R CI(s). In aspects, OSMOA NGDCI(s) comprise Ab AARS(s). In aspects, OSMOA NGDCI(s) lack Ab sequences. In aspects, OSMOA NGDCI(s) are multimeric non-Ab sequence PPTs, such as trap proteins.

[1093] In aspects, CAgES CEPs comprise NANCIPI(s). In aspects, OSMOA of the NANCIPI(s) of a CEP are cytokine(s). In aspects, cytokine(s) include IL-2, IL-12, IL-15, IL-7, GM-CSF, IFNg, or combinations. In aspects, OSMOA CAg(s) are Ag(s) associated with melanoma or renal cell carcinoma and CEP comprises GM-CSF. In aspects, OSMOA CAg(s) are associated with cervical cancer and CEP comprise IL-12. In aspects, OSMOA CAg(s) are associated with melanoma and cytokine(s) comprise IL-2.

[1094] In aspects, CAg CEPs comprise one or more additional anti-cancer sequences that DOS enhance the immunogenicity of the CEP. In AOTI, such an additional sequence(s) comprises HSP sequence(s)/PPT(s) (e.g., Ag FPs comprising HSP sequences). In AOTI, such sequence(s) comprise co-stimulatory molecule PPT(s)/sequence(s). In AOTI, a CEP comprises a combination of co-stimulatory molecule PPT(s)/sequence(s) (e.g., a TRICOM PPT, comprising B7.1, ICAM-1, and LFA-3 sequences). In AOTI, such sequence(s) comprise a p16INK4a PPT/sequence. In an aspect, additional sequence(s) comprise an hTERT sequence/PPT. In an aspect, additional sequence(s) comprise anti-angiogenic sequence(s)/PPT(s), such as an anti-VEGF Ab, a VEGFIR, or a VEGF2R. In aspects, an additional sequence comprises a non-Cancer Ag, such as an AARS from protein D from Heamophilus influenzae B. In aspects, additional sequence(s) comprise adhesion molecule sequence(s)/PPT(s), such as ICAM-1 or VCAM-1. In aspects, additional sequence(s) comprise death receptor PPT(s)/sequences, such as FasL and TRAIL, and IDO. In aspects, additional sequence(s) comprise T reg suppression factors, such as anti-CD25 Ab PPTs, a GITR agonist ligand, or combination. In aspects, additional sequence(s) comprise PPT(s) or sequence(s) that downregulate or block activity of tumor-associated macrophages (TAMs) or other suppressive myeloid cells (e.g., anti-IL-6R Ab, anti-CSF-1R Ab, and anti-CCL2 Ab PPTs, and STING agonist(s)).

[1095] In aspects, gDS(s) of a CAgES CEPESC comprise gDSS(s). In aspects, gDS(s) comprise MgDS(s) (e.g., gDS(s) comprising GSRV(s)). In aspects, OSMOA gDP(s), such as OSMOA gDAgFP(s) of a CEP lack gD TM domains. In aspects, OSMOA CAg(s) in gDAgFP(s) of CEPs are positioned downstream of any gDS(s). In aspects, CAg(s) are positioned between gDS(s) and downstream of gDS(s) in gDAgFP(s).

[1096] In aspects, CAgES CEPESCs comprise NAMs that comprise EEI(s), ISNS(s), or both. In aspects, OSMOA EPESNAMs of CEPESCs are NAVs. In aspects, OSMOA NAVs are mRNA vectors. In aspects, OSMOA NAVs are plasmids. In aspects, plasmids are associated with TFAs, such as CaPNP(s). In aspects, CaPNP(s) DOS anti-cancer IR(s). In aspects, NAM(s) are contained in cellular vectors, such as bacterial cell(s) or dendritic cell(s).

[1097] In aspects, CEPESCs comprise two or more types of NAMs. In aspects, one type of NAM encodes a gDAgFP comprising CAg(s) and a second type of NAM encodes a second type of gDP, CAg(s) (e.g., PE(s)), ITII(s), CI(s) (e.g., NGDCI(s)), NANCIPI(s), or combinations of some or all thereof.

[1098] In aspects, CEPESC(s) are combined with CCC(s). Numerous additional types of combination compositions for cancer are described elsewhere here. Examples of CCC(s) include chemotherapeutics (e.g., chemotherapeutics that deplete immunosuppressive Tregs, MDSCs, or both, such as thalidomide derivatives), indoleamine 2,3-dioxygenase (IDO) inhibitors, STING agonists, agonists of selected TNF receptor family members (e.g., targeting CD40, 4-1BB/CD137, OX-40/CD134, or CD27), tumor suppressor proteins (e.g., APC, DPC4, NF-1, NF-2, MTS1, RB, and p53), inhibitors of undesirable cytokines (e.g., inhibitors of IL-20, TGF-β, IL-6, or combinations), agents that lower the tumor apoptosis threshold (e.g., cisplatin), and γC cytokines such as IL-7, IL-15, and IL-21 or IL-2. Peptidic agents in this list also can be expressed as “additional sequences” in the CEP. Additional agents include lipid and carbohydrate TAA(s) and immunoadjuvants (e.g., Sialyl Lewis, poly ICLC, or oxidized mannose (mannan)), CA19-9-targeted vaccines or CA19-9 Abs, or Anti-TGFβ. Method can comprise associated administration of such agents. Combinations also can comprise chimeric antigen receptor-(CAR-)T cell immunotherapy (e.g., anti-CD19 anti-CD20, anti-CD30, or anti-CD123 CAR-T), cellular therapies (e.g., ex vivo modified CTLs, DCs, and the like) (SFE Todryk S, Jozwik A, de Havilland J, Hester J. Emerging Cellular Therapies: T Cells and Beyond. Cells. 2019; 8(3):284. doi:10.3390/cells8030284),

[1099] Toll-like receptor (TLR) agonists (e.g., flagellin, LPS, MPL (3-O-desacyl-4′-monophosphoryl lipid A), or CpG ODN), Prostaglandin E2, Arginase inhibitors, A2AR antagonists, metformin, adenosine receptor or ectonucleotidase inhibitors, DNA methyl transferase (DNMT) inhibitors, histone deacetylase (HDAC) inhibitors, HDAC inhibitors, DNMT-inhibitors, TAA-derivatives (e.g., keyhole limpet hemocyanin (KLH) carrier TAAs), allogeneic tumor cell vaccines, and autologous tumor vaccines. Additional compounds and principles are described in, e.g., Rossi J F et al. Cancer Commun (Lond). 2019; 39(1):34. Published 2019 Jun. 14. doi:10.1186/s40880-019-0379-3 and Guo C, et al. Adv Cancer Res. 2013; 119:421-475. doi:10.1016/B978-0-12-407190-2.00007-1; and Vermaelen K. et al. Front Immunol. 2019; 10:8. Published 2019 Jan. 22. doi:10.3389/fimmu.2019.00008

### d. Applications of CAgES CEPESCs (Methods)

[1100] In AOTI, any above-described CAgES CEPESCs can be delivered in EA(s), 1+ times, to induce anti-cancer IR(s). In AOTI, CAgES CEPESCs are delivered to induce protective/prophylactic IR(s). In aspects, CAgES CEPESCs are used therapeutically. In AOTI, CEPESCs are delivered to TR(s) with a malignant cancer. In AOTI, CEPESCs are delivered to TR(s) diagnosed with early stage cancer (a cancer that is not invasive or metastatic or is classified as a Stage 0, I, or II cancer). In AOTI, TR(s) are diagnosed with a precancerous condition (e.g., having growth that typically precedes or develops into a cancer). In aspects, TR(s) have a non-metastatic condition (e.g., a cancer that is benign or that remains at the primary site and has not penetrated into the lymphatic or blood vessel system or to tissues other than the primary site). In aspects, IR(s) comprise DOS reduction in the invasion of tissues.

[1101] In aspects, delivery of EA(s) of CAgES CEPESC(s) induces anti-cancer CE(s). In aspects, delivery of EA(s) of CAgES CEPESC(s) treats or prevents cancer(s). In aspects, such a cancer is an HPV-associated cancer, HBV-associated cancer, ovarian cancer, prostate cancer, breast cancer, brain cancer, head and neck cancer, histiocytic sarcoma (HS), throat cancer, lung cancer, liver cancer, cancer of the pancreas, kidney cancer, bone cancer, melanoma, metastatic cancer, hTERT-associated cancer, FAP-antigen associated cancer, non-small cell lung cancer, blood cancer, esophageal squamous cell carcinoma, cervical cancer, bladder cancer, colorectal cancer, gastric cancer, anal cancer, synovial carcinoma, testicular cancer, recurrent respiratory papillomatosis, skin cancer, glioblastoma, hepatocarcinoma, stomach cancer, acute myeloid leukemia, triple-negative breast cancer, or primary cutaneous T cell lymphoma. In aspects, delivery of EA(s) of CAgES CEPESC(s) treats any cancer AW CAg(s) in the CEP.

[1102] In aspects, CE(s) comprise reducing the size of an established tumor or lesion in the subject. In aspects, tumor(s) are reduced in size by about 50% to about 100%, about 60% to about 100%, about 70% to about 100%, or about 80% to about 100%.

[1103] In aspects, CE(s) comprise DOS enhancement of tumor regression in TR(s). In aspects, CE(s) comprise increasing tumor regression by about 40% to about 100%, about 60%-100%, about 70%-˜100%, or ˜80% to ˜100%.

[1104] In aspects, CE(s) comprise a DOS increase in the rate of survival of TR(s) with or that subsequently develop cancer(s). In aspects, CE(s) comprise a DOS increase in longevity in TR(s). In aspects, CE(s) comprise a DOS enhancement in quality of life.

[1105] In aspects, CEPESC(s) are delivered by injection. In aspects, CEPESC(s) are delivered by mucosal administration. In aspects, CEPESC(s) are delivered through electroporation. In AOTI, CEPESC(s) are delivered through biolistic (e.g., “gene gun”) methods. Additional delivery methods are DEH.

[1106] In AOTI, CAgES CEPESC(s) are administered 2+ times in anti-cancer methods. In AOTI, different CEPESC(s) are administered to TR(s). In AOTI, the same CEPESC is administered 2+ times in methods. In AOTI, methods comprise administering CEPESC(s) and other agents (e.g., in co-administration or sequential administration). In an aspect, a CI or a CI-encoding NAM is administered several days (e.g., about 1 week) after an initial immunization with a CAgES CEPESC. In aspects, the second CI administration is a CAgES CEPESC comprising CI(s) (e.g., CI gDS(s), NGDCI(s), or both).

[1107] In aspects, IR(s) include a DOS reduction in aspect(s) of cancer progression (even(s) in the transformation of non-neoplastic cell(s) to cancerous, neoplastic cell(s), the migration of such neoplastic cells, the formation of tumors, or combinations, including cell crisis, immortalization and/or normal apoptotic failure, proliferation of immortalized and/or pre-neoplastic cells, transformation (i.e., changes which allow the immortalized cell to exhibit anchorage-independent, serum-independent and/or growth- factor independent, or contact inhibition-independent growth, or that are associated with cancer-indicative shape changes, aneuploidy, and focus formation), proliferation of transformed cells, development of metastatic potential, migration and metastasis (e.g., the disassociation of the cell from a location and relocation to another site), new colony formation, tumor formation, tumor growth, neotumorogenesis (formation of new tumors at a location distinguishable and not in contact with the source of the transformed cell(s)), and combinations. Aspects also include initiation, promotion, and progression, such as tumor initiation, tumor promotion, malignant conversion, and tumor progression (SFE CANCER MEDICINE, 5th Edition (2000) B.C. Decker Inc., Hamilton, Ontario, Canada (Blast et al. eds.)). Tumor initiation aspects include induction of mitogenesis, compensatory cell proliferation, preneoplasia or hyperplasia, immortalization, and immunosuppression). In aspects, delivery of EA(s) of CAgES CEPESC(s) DOS reduces such event(s) in cell(s) in TR(s).

[1108] In aspects, IR(s) comprise increasing the number of CAg-specific IC(s). In aspects, such IC(s) comprise T cells. In aspects, IR(s) include DOS increases in IC(s) in the tumor microenvironment (TME). In aspects, IR(s) include DOS increases in CD4 cells, CD8 cells, or both, in the TME that are specific to CAg(s) in CEP(s). In aspects, IR(s) include DOS increases in anti-cancer cytotoxic IC activity in TR(s). In aspects, cytotoxic activity includes anti-cancer NKC activity, T-cell activity, or both.

[1109] In aspects, anti-cancer IR(s) lead to anti-cancer CE(s) in TR(s). In aspects, CE(s) comprise increase in average survival period, increase in TR(s) exhibiting DOS survival benefits, DOS reduction in disease symptom(s), DOS elimination of detectable disease cells, DOS induction of period(s) of disease-free or progression-free survival, objective durable cancer regression(s), or combinations. In aspects, CE(s) include increase in survival in TR(s) by at least about 3 months, at least about 4 months, at least about 6 months, at least about 1 year, at least about 18 months, at least about 2 years, at least about 2.5 years, at least about 3 years, or at least about 5 years, or longer.

[1110] In aspects, CAgES CEPESC(s) DOS outperform corresponding Ag peptide vaccines, corresponding viral vector vaccines comprising corresponding CAgES(s), or DNA vaccines comprising standard corresponding CAgES(s) with respect to IR(s) or CE(s). In aspect, CAgES CEPESC(s) DOS outperform current standard of care cancer treatments in TR(s) in terms of IR(s) or CE(s). In aspects, CAgES CEPESC(s) DOS outperform any of the corresponding CAgES compositions described in the Wistar Art, even when the same antigens are used (e.g., the gD-MELAPOLY or gD-E6/E7 constructs described therein).

[1111] In aspects, TR(s) are humans. In aspects, TR(s) are NHA(s). In aspects, TR(s) are companion animal(s). In aspects, NHA(s) are dogs.

[1112] In aspects, TR(s) are dogs of breeds at high risk for development of a cancer associated with CAg(s) in the CEP (SFE Davis B W et al. ILAR J. 2014; 55(1):59-68. doi:10.1093/ilar/ilu017). E.g., in an aspect, CAgES comprising CAg(s) that induce IR(s) to histiocytic sarcoma (HS), and EA(s) of such CEPESC(s) are administered to flat-coated retrievers or Bernese mountain dogs. In aspects, CE(s) in such dogs comprise DOS reduction in cancer in joints, viscera, spleen, liver, lungs, muscle, or combinations.

[1113] In aspects, a CEPESC exhibits DOS CE(s) in both dogs and humans for cancer(s). In aspects, a CEPESC is evidenced through clinical studies to exhibit DOS CE(s) against cancer(s) in dog(s) and thereafter tested or used as a corresponding anti-cancer treatment in human patients. Thus, in aspects, CEP(s) can comprise PCRA(s) tested for anti-cancer effects in multiple species, such as dogs and humans. In aspects, PCRA(s) are identified by studying cancer-associated differentiations in dog breed(s), between dog breed(s), or both, and incorporating putative CAg(s), such as putative TSA(s) (e.g., putative SNA(s)) into CEP(s), optionally after enhancement (e.g., through association with ITS(s), through modifications to form related AgV(s), or both).

[1114] In aspects, a CAgES CEPESC comprises CAg(s) associated with cancer(s) that are considered to exhibit similar/shared characteristics in two or more species. In aspects, such species comprise dogs and humans. In aspects, OSMOA CAg(s) are of or associated with cancer(s) in which some, most, or at least generally all similar molecular, physiological, or other characteristics, such as histopathology, tumor heterogeneity, gene expression patterns, immunology, metastasis, invasion, response to treatment, prognosis, or combinations are deemed similar in art or are similar by objective measurements (e.g., share a significant similarity as compared to comparisons with other cancer(s)) in two or more species, such as dogs and humans. Such conditions in dogs and humans include bladder cancer and lymphoma, which are described in further detail to exemplify aspects.

### 1) Bladder Cancers

[1115] In aspects, CAgES CEPESC(s) are delivered to humans, dogs, or other TR(s) at risk for or diagnosed with bladder cancer (BCCR).

[1116] In aspects, CAg(s) in anti-bladder cancer CEP(s) comprise AARS(s) of or related to Her2, NY-ESO-1, MAGE 1, MAGE 2, MAGE 3, MAGE4, LAGE-1, CT Antigen, MAGE C2, EGFR Receptor, Mucin1, Sialyl TN, or combinations. In aspects, OSMOA CAg(s) in anti-BCCR CEP(s) MUC-1, CT Ag, NY-ESO-1, or HER2 Ag(s), or combinations. In aspects, CAg(s) in anti-BCCR CEP(s) comprise PE(s) comprising 2, 3, 4, 5, or more CAg(s). In aspects, PE(s) comprise 2, 3, or the specific TAA(s) cited in this paragraph. In aspects, anti-BCCR CEP(s) comprise oncoproteins relating to EGF-EGFR, ERBB2, UPK3A, ERBB2, FOXA1, ZEB1, ZEB2, CDH1, VIM, S100A1, S100A9, EGFR, or PPARG oncogenes, or combinations. In aspects, OSMOA CAg(s) in anti-BCCR CEP(s) are SNA(s). In aspects, CAg(s) comprise SNA(s) and TAA(s).

[1117] In aspects, most or all CAg(s) in CEP(s) are contained in gDFPAg(s). In aspects, OSMOA CAg(s) in PE(s) are associated with MSL(s), FL(s), MSFL(s), or self-cleavage site(s). In aspects, OSMOA CAg(s) are associated with PTPS(s). In aspects, OSMOA of such CAg(s) are AgV(s), e.g., GSRV AgV(s), Ag FPs (e.g., HSP-Ag FP(s)), editopes, or combinations.

[1118] In aspects, anti-BCCR CEP(s) comprise ITII(s) (e.g., EAT-2 PPT(s) or AARS(s), such as hEAT-2, mEAT-2, FFs of either, or FVs of any).

[1119] In aspects, anti-BCCR CEP(s) comprise CI(s). In aspects, anti-BCCR CEP(s) comprise at least 2 CI(s). In aspects, anti-BCCR CEP(s) comprise gDS CI(s), NGDCI(s), or both. In aspects, CEP(s) comprise or are administered in association with NGDCI(s). In aspects, NGDCI(s) include PD-1 CI(s), PD-L1 (a.k.a., PDL-1) CI(s), CTLA-4 CI(s), LAG3 CI(s), TIM CI(s), CRACC CI(s) (e.g., a CRACC-fc PPT), BLTA-4 CI(s), VISTA CI(s), or combinations. In aspects, anti-BCCR CEP(s) comprise Fibroblast Activation Protein (FAP) PPTs that DOS kill cancer-associated fibroblasts, reduces cancer-associated immunosuppression, or both (FAP can be administered in any CEP of any other aspect as well) (SFE O'Connell A, et al. Cancer Immunol Res Feb. 1 2019 (7) (2 Supplement) A096; DOI: 10.1158/2326-6074.CRICIMTEATIAACRi8-A096).

[1120] In aspects, anti-cancer CEP(s), such as anti-BCCR CEP(s) or anti-lymphoma CEP(s) are delivered to TR(s) having a T cell inflamed tumor microenvironment (TME). In aspects, delivery of a CEP to a T cell inflamed TME DOS enhances activity or population of tumor-infiltrating lymphocytes (TIL(s)). In aspects, anti-cancer CEP(s) are delivered to TR(S) having a non-inflamed TME. The TME is understood in the art and generally refers to the matrix of cells surrounding and infiltrating tumors. In detected cancer, TMEs typically are immunosuppressive and both protect tumors from immune attack and nourish growth/progression of neoplastic cells and related biological signals and processes. In aspects, IR(s) induced by CEPESC(s) comprise DOS increases in IFNg production, DOS CD8-mediated cytotoxicity (e.g., in the TME), increased CD4 numbers/activity, or combinations. In aspects, IR(s) comprise detectable destruction of TME(s). In AOTI, CE(s) comprise DOS tumor eradication, tumor growth cessation, tumor size reduction, delayed cancer progression, or CT.

[1121] In aspects, a BCCR or another cancer comprises transitional cell carcinoma (TCC) cell(s). In aspects, CEPESCs are used to induce IR(s) in TCC cell(s) or in TR(s) diagnosed with TCC cell-associated cancer(s). TCCs are a major characteristic of BCCR(s) and can be used as an alternative characterization for cancers that typically include BCCR(s). In aspects, a BCCR TR is diagnosed as having C2-Squamous-like, C1-LUAD-enriched, or both C2 and C1 immunological cancer(s) groups.

[1122] In aspects, delivery of an anti-cancer CEPESC results in reduced activity or numbers of myeloid-derived-suppressor cells (MSDCs). In aspects, a CEP comprises a factor that reduces or blocks the activity of MSDCs (e.g., a ISNS, such as a CpG sequence) or is administered in association with such a factor (e.g., metformin). In aspects, an anti-cancer CEP comprises PPTs that downregulate/block TReg activity, such as anti-CTLA-4 PPTs, OX40 PPTs, and cytokines, such as IL-2. In aspects, CEP(s) comprise β-Catenin-blocking PPTs (e.g., PPTS comprising AARS(s) of β-Catenin blocking peptides (SFE Hsieh, T et al. Sci Rep 6, 19156 (2016). https://doi.org/10.1038/srep19156) or anti-β-Catenin Ab PPTs) or AAW β-Catenin blocking agent(s).

[1123] In aspects, IR(s) comprise DOS recruitment, expansion, activity, or combinations thereof of DCs, T-cells, BCs, NKCs, or combinations to tumors/TMEs. In aspects, such enhancements are in tissues/organs associated with improved cancer CE(s). E.g., in aspects CE(s) comprise DOS increases in cytotoxic T cells in peritumoral stroma.

[1124] In aspects, anti-BCCR CEPESC(s) are combined with CCP(s); delivered AAW CCC(s), CCEPM(s), or both; or methods comprise combinations thereof. In aspects, CCEMP(s) comprise surgical excision of tumor(s), radiation therapy, or both. In aspects, CCC(s) comprise anti-cancer NSAID(s), such as piroxicam; chemotherapeutic agents (e.g., mitoxantrone, vinblastine, or both); or combinations. In aspects, CEPESCs combined with anti-cancer CCC(s), CCEPM(s), or both, DOS enhance anti-cancer IR(s).

[1125] In aspects, anti-BCRR CEPESC(s) DOS induce anti-BCCR IR(s). In aspects, EA(s) of anti-BCRR CEPESCs treat or prevent BCCR(s). In aspects, anti-cancer CEPESCs delivered to TR(s) diagnosed with cancer prior to treatment exhibit DOS enhanced periods between recurrence of cancer(s). In aspects, delivering anti-BCRR CEPESC(s) provide an remission rate of more than 35%, such as at least about 40%, at least about 45%, at least about 50% or more in TR(s). In aspects, delivering EA(s) of anti-BCRR CEPESC(s) result in disease stabilization in at least about 50%, 60%, 65%, or 75% of TR(s). In aspects, average survival time in BCCR TR(s) receiving such methods are at least 1 year, 1.2 years, 1.5 years, 2 years, 2.5 years, or 3 years. In aspects, such methods DOS reduce cancer spread. In aspects, such methods DOS improve symptoms of BCRR(s), such as BCRR-associated urinary obstruction.

[1126] In aspects, anti-BCCR CEPESC(s) are delivered to humans, NHA(s), or both. In aspects, a NHA is a companion animal, such as a dog. In aspects, dog(s) comprise a terrier breed dog, collie bred dog, or beagle breed dog. In aspects, dog(s) comprise Scottish terriers, West Highland White Terriers, Eskimo Dogs, Shetland Sheepdogs, Keeshonds, Samoyeds, or Beagles. In AOTI, CEP(s) comprise BCCR-associated PCRA(s). In aspects, PCRA(s) are screened to develop CRA(s) in dog(s) & such CRA(s) are delivered as PCRA(s) in CEP(s) in humans until CRA(s) are identified & a CEPESC that induces DOS protective/therapeutic CE(s) WRT BCRR in humans achieved.

[1127] In aspects, BCCR related CAg(s) comprise a MPHOSPH1-278 peptide (e.g., SEQ ID NO:717), a DEPDC1-294 peptide (e.g., SEQ ID NO:718) or CT. Such CAg(s) are described in Obara W et al. Jpn J Clin Oncol. 2012; 42(7):591-600. doi:10.1093/jjco/hys069. In aspects, BCCR CAg(s) comprise Tumor-Associated Glycoprotein 72 (SFE Nagaya et al. Oncotarget. 2018; 9(27):19026-19038. doi:10.18632/oncotarget.24876). In AOTI, CCCs or AACs comprise BCG (Bacillus Calmette-Guerin) (SFE Obara et al. Cancer Immunol Immunother. 2018; 67:1371-80. doi:10.1007/s00262-018-2197-x). In AOTI, CCCs/AACs comprise Mycobacterium bovis BCG or Mycobacterium brumae BCG-like compositions (SFE, Noguera-Ortega E et al. Sci Rep. 2018; 8(1):15102. doi:10.1038/s41598-018-33253-w). In aspects, CAg(s) used in BCCR directed CEPESC(s) comprise 1+, 2+, or 3+ of NY-ESO-1, LAGE-1, MAGE-A1, MAGE-A3, MAGE-A4, MAGE-A10, CT7, CT10, and GAGE. In aspects, CAg(s) comprise MAGE-A3+Ag(s) (e.g., an Ag RVRHRSIOI to SEQ ID NO:455), NY-ESO-1 (e.g., a CAg RVRHRSIOI to SEQ ID NO:456), or CT, optionally in combination with 1 or both of MPHOSPH1 (M phase phosphoprotein-1) and DEPDC1 (DEP domain containing-1 protein) (see also U.S. Pat. No. 9,545,437). In aspects, CAg(s) comprise a HER2/neu CAg (e.g., a CAg RVRHRSIOI to SEQ ID NO:457). In aspects, such CEP(s) comprise anti-cancer NCMIMP(s), such as GM-CSF PPTs. In aspects, CAg(s) in such CEPESCs comprise BRAF CAg(s) (SFE Cintolo J A et al. Melanoma Res. 2016; 26(1):1-11. doi:10.1097/CMR.0000000000000203 & Liu Q et al. Cancer Immunol Immunother. 2018; 67(2):299-310. doi:10.1007/s00262-017-2079-7). Examples of BRAF CAg(s) that can be included in CEP(s) include sequences RVRHRSIOI to OSMOA of SEQ ID NOs:451-454. BCCR-related aspects of the invention are further exemplified below.

### 2) Lymphomas

[1128] In other aspects, CAgES CEPESC(s) are delivered to dogs, humans, or both at risk for, or diagnosed with, canine lymphoma(s). In aspects, lymphoma(s) comprise diffuse large B-cell lymphomas (DLBCL), marginal zone lymphomas (MZL), or both. In aspects, lymphoma comprises peripheral T-cell lymphoma—not otherwise specified (PTCL-NOS) (high-grade), T-zone lymphoma (TZL)(low-grade), or both. In aspects, lymphoma(s) comprise B-cell malignancies, T-cell malignancies, or both.

[1129] In AOTI a lymphoma to be treated/prevented is associated with a viral infection (e.g., HCV, HTLV, KSHV, HIV, or EBV infection). In aspects, an anti-lymphoma CAgES CEPESC comprises VACA(s) or other anti-viral Ag(s) in combination with other CAg(s) (e.g., TSA(s), TAA(s), or both). In aspects, lymphomas are virus-free lymphoma(s) are lymphomas not associated with a particular virus (e.g., EBV-free lymphoma(s)).

[1130] In aspects, CAg(s) in CEP(s) delivered to treat or prevent lymphoma(s) comprise AARS(s) of or related to lymphoma-associated Id PPT(s) (Ig-Id protein), survivin, MAGE-A4, Synovial sarcoma X (SSX2), PRAME, NY-ESO-1, TCL1 (Weng J, et al. Blood. 2012; 120(8):1613-1623. doi:10.1182/blood-2011-09-382838), PASD1 (e.g., Cooper, C et al. Leukemia 20, 2172-2174 (2006). https://doi.org/10.1038/sj.leu.2404424), cTAGE (e.g., Usener D et al. J Invest Dermatol. 2003; 121(1):198-206. doi:10.1046/j.1523-1747.2003.12318.x), or combinations. In AOTI, CAg(s) in CEP(s) against lymphoma(s) comprise lymphoma-associated oncogene AARS(s), such as AARS(s) of or AW CD95, TP53, PTEN, CD79B/A, IκBα, CARD11, API2-MALT1, EZH2, Jak2, or REL oncogenes. In aspects, an anti-lymphoma CEP comprises TERT, MAGE1, NY-ESO1, or SSX-1 Ag(s) or combinations. In AOTI, anti-lymphoma CEPs comprise 2, 3, 4, or more CAg(s). In AOTI, OSMOA CAg(s) are in PE(s). In AOTI, OSMOA PE(s) are in gDAgFP(s). In AOTI, CEP(s) comprise Ag-associated PTPS(s). In AOTI, CEP(s) comprise ICSTAP(s) e.g., EAT-2(s).

[1131] In aspects, CEP(s) delivered for treating lymphoma(s) comprise or are administered in association with CI(s). In aspects, CI(s) comprise PD-L1 CI(s), PD-1 CI(s), CTLA-4 CI(s), FAP CI(s), CRACC CI(s) (e.g., CRACCFc), CDR112 CI(s), Lag-3 CI(s), or combinations. In aspects, gDS(s) exhibit CI activity in TR(s). In aspects, gDP(s) are HVEM-binding minimized gDP(s). In aspects, CEP(s) for lymphoma(s) comprise or are delivered in association with NANCIPI(s), such as cytokine(s), e.g., GMCSF. In aspects, CEP(s) comprise or are delivered in association with a bruton tyrosine kinase inhibitor, PI3K inhibitor or both. In aspects, CEP(s) comprise or are associated with anti-lymphoma Ab PPT(s), such as anti-CD20 Ab PPT(s). In aspects, anti-lymphoma CAgES CEPESC(s) comprise CCC(s) or are delivered in association with possible CCC(s) or CIIM(s), e.g., delivering a chemotherapeutic (e.g., CHOP (cyclophosphamide, doxorubicin, vincristine and prednisone), PCI-32765, KPT-335, or GS-9219), bone marrow transplant, applying radiation therapy, a thrombospondin-I PPT or mimetic, a NEMO-binding domain PPT that inhibits NFκB, a BTK inhibitor, or delivering any other anti-cancer CCC(s) described elsewhere herein or are otherwise known in the art (SFE Zappasodi R et al Front Immunol. 2015; 6:448. doi:10.3389/fimmu.2015.00448 and Richards K L et al. Immunol Rev. 2015; 263(1):173-191. doi:10.1111/imr.12238). In aspects, 6 month, 9 month, 12 month, 18 month, 24 month, 30 month, 3 year, 4 year, or 5 year survival in TR(s) after application of such method(s) is more than 20%, 25%, 30%, 40%, or 50%. In aspects, method(s) achieve complete DOS remission for 50% or more, 65% or more, or 75% of TR(s) lasting a median over more than 10 months, 12 months, 18 months, or 24 months. In aspects, TR(s) are diagnosed with significant risk of developing lymphoma based on indicator(s) (e.g., paraneoplastic hypercalcemia).

[1132] In aspects, the TR receiving anti-lymphoma CEPESC administration is a NHA, e.g., a companion animal, e.g., a dog. In AOTI, dog(s) PCGCOOCO breed(s) at high risk of lymphoma development, e.g., an Old English sheepdog, boxer, pointer, golden retriever, Rottweiler, St Bernard, Scottish terrier, bulldog, Irish wolfhound, Siberian husky, shih tzu, Airedale terrier, Cavalier King Charles spaniel, Yorkshire terrier, cocker spaniel, or basset hound. In aspects, such TR(s) receive PCRA(s) related to lymphoma. In aspects, CRA(s) identified in such animals are tested as PCRA(s) in human trials to develop CEP(s) comprising CRA(s) for treatment/prevention of lymphoma in humans.

### 2. gD AARS(s) and PPT(s)

[1133] CEP(s) comprise gD PPT(s) (gDP(s)). CEP(s) can comprise any suitable number of any suitable type(s) of gDP(s) and gD AARS(s). In aspects, CEPs comprise gDP(s) that are gD proteins, lacking any heterologous sequence(s) (e.g., a CEP can comprise gD protein(s) that have CI properties with other Ag(s), AgFP(s), EAT-2 PPT(s), and the like). In aspects, CEPs include gDP(s) that are gDS fusion proteins (or gDFP(s)), such as gDAgFP(s).

[1134] In AOTI, CEP(s) comprise 2+ types of gDP(s) (e.g., 2+ gDAgFP(s)). In aspects, methods include delivery of 2+ types of gDPES CEPESCs 2+ times.

[1135] In aspects, gDP(s) are multimeric PPTs, comprising 2+ associated gDP chains. In aspects gDP(s) are monomeric.

[1136] In aspects, CEPs initially comprise immature forms of gDPs that are subsequently processed in one or more ways to form more mature PPTs. E.g., a CEP comprising 2+ gDP portions divided by SCSs can be cleaved forming two separate and more mature gDP portions. In aspects, gDP(s) can comprise a gDSS that is cleaved to form a more mature gDP. In aspects, gDPs can be post-translationally modified by, e.g., glycosylation in COEs. gDPs can include elements that result in 2+ of such modifications.

[1137] gDP(s) can comprise any suitable number any suitable type of functional gDS(s) (also sometimes called “gD domains” or “gDDs”). In aspects, OSMOA gDP(s) of a CEP are gDAgFP(s). However, any suitable aspect of the disclosure that relates to gDgDAgFP(s) can be applied to non-FP gDP(s) and vice versa (e.g., composition of gDS(s), origin/relatedness of gDS(s), function of gDS(s), modifications to gDS(s), and combinations thereof and certain uses of gDS(s) (e.g., checkpoint inhibition and signaling).

### i. Size and Number of gDS(s)

[1138] gDPs can include any suitable number of gDS(s) of any suitable type. Different gDS(s) are defined by (1) detectably different functions, compositions, or both, and (2) in respect of gDSFPs, such as gDAgFPs, based on position of gDS(s) and non-gDS AARSs in the FP. Each gDS(s) of a gDP exhibits a measurable function in TR(s), but additional portions of gDS(s) that do not exhibit discrete functions can also be included in a gDP. Functionality of gDS(s) can vary with TR. E.g., WT HSV-1 gD PPT only exhibits HVEM-related checkpoint inhibition in HVEM-expressing TRs. Typically, each discrete gDS in a gDP is at least about 10 AARs or at least about 15 AARs in length (e.g., ˜15-425 AAs). In aspects, OSMOA gDS(s) in a gDP are at least 20 AAs in length (e.g., about 20-400, 30-400, 20-380, 30-390, 25-375, 40-380, 40-360, 20-360, 25-350, 30-350, 50-350, or 50-400 AAs). In aspects, OSMOA gDS(s) of gDP(s) are at least about 15% smaller than WT gDP(s), such as ≥25% smaller, ≥33% smaller, ≥40% smaller, or ≥50% smaller (e.g., 25-350 AAs, 30-300 AAs, 30-330 AAs, 40-360 AAs, 40-340 AAs, 40-280 AAs, 20-280 AAs, 20-240 AAs, 20-220 AAs, 40-220 AAs, or 50-200 AAs). In aspects, OSMOA gD(s) of gDP(s) are less than 200 AAs in length (e.g., 20-180 AAs, 20-120 AAs, or 20-100 AAs), less than 120 AAs in length, or less than 60 AAs in length (e.g., 15-45 AAs, 20-50 AAs, 15-30 AAs, 20-30 AAs, or 15-40 AAs).

[1139] gDP(s) can comprise any suitable number of gDS(s). In aspects, gDP(s) comprise only 1 gDS. In aspects, gDP(s) comprise 2+ gDS(s). In aspects, gDP(s) comprise 3, 4, or more discrete gDS(s). In aspects, gDP(s) comprise copies of gDS(s). For example, in an aspect, a gDP can be considered a fusion protein comprising two immature gDP(s) (e.g., two fused gDAgFP(s)) and a linker comprising a self-cleavage site, where such two fused gDP(s) can comprise 2+ identical gDS(s), different gDS(s), or combinations.

[1140] Different discrete gDS(s), if present, can be organized in any suitable manner in gDP(s). Discrete gDS(s) can be directly linked (e.g., a gDSS and a receptor-binding gDS), indirectly linked (e.g., separated by linker(s), such as MSFL(s)), or both. In gDSFPs, such as gDAgFPs, gDS(s) can be separated by Ag(s) or other components of the FP(s).

### ii. Organization of gDSs and Other Sequences in gDFPs

[1141] In gDSFPs, e.g., gDAgFPs, gDS can be CB on, ia, organization of gD and non-gD (heterologous-to-gD) AARSs. In general, gDSFPs can comprise any suitable number of non-gDS(s) and gDS(s) in any suitable relationship.

[1142] In aspects, a gDSS is positioned at the N-terminus of an immature gDP, such as a gDSFP. In aspects comprising gD receptor binding domain(s) (gDRBD(s)), gDRBD(s) are positioned at or near the N-terminus of the mature gDSFP (e.g., in the first 50%, 33%, 25%, 20%, or 10% of the AARS).

[1143] In AOTI, non-GD sequences (NGDS(s), e.g., Ag(s)) are positioned directly or indirectly between two gDSs (in indirect positioning one or both NGDS(s) are bound to gDS(s) through intervening sequences, such as MSL(s) or FL(s) or self-cleavage site AARS(s)). Such positioning is exemplified by the constructs in the Wistar Art that were subject to actual in vivo experiments.

[1144] In aspects, NGDS(s) are positioned upstream, downstream, or both of any gDS(s) in a gDSFP. In aspects, OSMOA NGDS(s) of a gDSFP are positioned downstream of any gDS(s) in the PPT. In aspects, NGDS(s) are positioned both between gDS(s) and downstream of any gDS(s). In aspects, NGDS(s) are only located downstream of gDS(s). E.g., in gDAgFPs such PPTs can have a structure such as first gD sequence (gD1), first Ag sequence (Ag1), second gD sequence (gD2), and second Ag sequence (Ag2)(gD1-Ag1-gD2-Ag2). In aspects, a gDAgFP has a gD1-Ag1 structure, gD1-gD2-Ag1 structure, etc. In aspects, gDSFPs incorporate a gDSS, multiple Ag(s), ITS(s) (e.g., PTPS(s)), linkers (Ls), self-cleavage sites (SCSs), and the like, providing gDSFP structures such as gDSS-gD1-PTPS1-Ag1-PTPS2-L-SCS-L-PTPS3-Ag2-PTPS4-L-SCS-L-PTPS5-Ag3-PTPS6-L-SCS-L-PTPS7-Ag4-PTPS8-L-SC-LgD2-PTPS9-Ag9-PTPS10-L-SC-L-PTPS11-Ag10-PTPS12 or similar structures in which one or more Ls, SCSs, PTPSs, or Ags are removed or added to the structure.

[1145] In AOTI where gDAgFP(s) comprising PE(s) & ITS(s), ITS(s) can be associated with the PE sequence, each Ag of the PE sequence (as exemplified above), or a mixture thereof. E.g., a gDAgFP can have the structure gD1-PTPS1-Ag1-L-Ag2-L-Ag3-L-Ag4-L-PTPS2-gD2, the structure gD1-PTPS1-Ag1-L-Ag2-L-Ag3-L-Ag4-L-PTPS2, or the structure gDSS-gD1-Ag1-Ag2-Ag3-Ag4-PTPS. In aspects, NGDS(s) are positioned upstream of gDS(s) (e.g., in aspects in which a gDSFP comprises a gD profusion domain (gDPFD)). Such gDSFPs can have a structure such as gDSS-NGDICRTS-Ag1-L-Ag2-L-Ag3-L-Ag4-L-Ag5-L-gDPFD or NGDSS-NGDICRTS-Ag1-Ag2-Ag3-gDPFD. In aspects, CEP(s) comprise 2+ gDSFP(s) having different arrangements of gDS(s) and NGDS(s).

[1146] In aspects, OSMGAOA gDS(s) in gDP(s) of CEPs are either of or RVRHROSI, SVSHSOCE, or both to gDS(s) of a virus that infects a species (a) of which OSMGAOA Ag(s) are of or are RVRHROSI/SVSHSOCE (e.g., in the case of CAg(s)) or (b) that is the same as the species that a DCA of which OSMGAOA Ag(s) are from or are RVRHROSI/SVSHSOCE. E.g., in one aspect CEPs comprise gDP(s) that comprise WT gDS(s) of HSV-1, HSV-2, or both, or FV(s) of such sequences and Ag(s) of a human cancer or Ag(s) of a pathogen DCA that infects humans, such as a human influenza virus, a human-infecting bacteria, or a human-infecting non-viral/non-bacterial pathogen/parasite. In aspects, OSMGAOA gDP(s) in CEPs are of or are RVRHROSI/SVRHSOCE to a gD that infects a first species that is different from the species that either (a) MGAOA Ag(s) are from or (b) a species infected by the DCA from which MGAOA Ag(s) are from or are RVRHROSI/SVSHSOCE. E.g., in aspects, a CEP comprises a gDAgFP comprising HSV gDS(s) and mostly, generally, or only porcine or canine Ags or Ags of a DCA (e.g., a virus) that infects pigs or dogs.

[1147] gDAgFP(s) can comprise any suitable number of any suitable type of ITS(s) in any suitable association with Ag(s) of the FP. E.g., a gDAgFP can comprise ERTP(s) and PTPS(s), exon-targeting ITS(s) and PTPS(s), or other combinations of ITS(s). In aspects, OSMOA ITS(s) in a gDAgFP are linked directly or indirectly to Ag(s) (e.g., PE(s)).

[1148] Other elements of CEP(s) can be included in gDSFP(s). E.g., gDSFP(s) can comprise ITII(s) (e.g., EAT-2 AARS(s)), NANICPI(s) (e.g., cytokine AARS(s)), NGDCI(s) (e.g., PD-L1, CD112R, FAP, or CRACC AARS(s)), or other functional AARS(s). In aspects, gDAgFP(s) comprise OSMOA of such types of additional sequence(s). Such additional sequences can be contained in any suitable number, linked in any suitable manner, and be positioned in any position of the gDSFP. In aspects, such additional sequence(s) are positioned between gDS(s), downstream of any gDS(s) in the FP, or both. In aspects, one or both ends of such sequences are associated with Ls (e.g., MSLs/FLs), SCSs, or both. In aspects, such additional sequences are not positioned between any of the Ag sequences of a gDAgFP.

### iii. Composition & Function(s) of gDS(s)/gDD(s)

[1149] gDS(s) can have any suitable composition and origin/homology. In aspects, gDS(S) are identical to at least part of an AARS of a WT gD PPT. In aspects, a gDS comprises sequence(s) identical to functional domain(s) of WT gD(s). In aspects, gDS(s) comprise FFs of gDS(s). In aspects, gDS(s) comprise FVs of either a FL WT gD or a FF. In aspects, gDPs comprise gDS(s) that are a mixture of such different types of sequences.

[1150] In aspects, OSMGAOA of gDS(s) of gDP(s) in CEPs are AARSs in a WT HSV gD. In aspects, OSMGAOA gDS(s) of gDP(s) are AARSs that occur in a WT HSV-1 gD. In aspects, OSMGAOA gDS(s) of gDP(s) are AARSs of a WT HSV-1 gD. HSV-1 and HSV-2 WT gDs are known and can respectively include any known WT variations (see Uniprot Q69091 and P03172, respectively). In aspects, OSMGAOA gDS(s) of gDP(s) in CEPs are WT AARSs of non-HSV gDs. Examples of such non-HSV gDs include PRV/Suid alphaherpesvirus 1 gD (GenBank: AA062939.1); Gallid alphaherpesvirus-2/MDV-1 gD (Uniprot Q6764); EHV-1 gD (Uniprot Q6DLD9); EHV-4 gD (Uniprot AOAOYOA4Z5); Canid alphaherpesvirus 1 gD (Uniprot 041524); BHV-1 gD (Uniprot POCK29); BHV-5 gD (Uniptor Q65535); Simian herpes B virus gD (Uniprot AOA1X9WGB3); Meleagrid alphaherpesvirus 1 (MeHV-1) gD (Uniprot Q9DPP3); feline herpesvirus 1 (FeHV-1) (Feline viral rhinotracheitis virus) gD (Uniprot Q89634); and Gallid alphaherpesvirus 1 (Infectious laryngotracheitis virus) gD (GenBank Q67644). gDS(s) of gDP(s) can comprise AARS(s) of 1+, 2+, or 3+ such WT gDP(s). In aspects, OSMGAOA of gDS(s) in gDP(s) of a CEP are FL WT gDS(s). In aspects, OSMGAOA of gDS(s) in gDP(s) of a CEP are FFs of FL WT gDS(s).

[1151] In aspects, OSMGAOA gDS(s) in gDP(s) are WT gDS(s) of 1, 2, or more WT gDs. WT gDs herein can include any naturally occurring variations in WT gDs (e.g., G->S at AA50, 30A->V, 281L->I, 353A->V, 367R->H, 369 R->H, 371 R->Q of HSV-1 gD (see and cf., Uniprot Entry Q69091 to SEQ ID NO:29). Variant of gDS(s) also can comprise such natural variations in addition to non-naturally occurring variations. In aspects, OSMGAOA gDS(s) of a gDP are from 1 species of a-HV, such as PRV, HSV-1, HSV-2, BHV-1, BHV-5, EHV-1, or EHV-4. Where an aspect provides for a particular function it can serve to determine if such a substitution is suitable. For example, with respect to HSV-1 gD proteins and polypeptides that can bind HVEM, substitution with a WT HSV-2 gD or N-terminal portion thereof typically would not be suitable, since such gDS(s) do not DOS bind HVEM.

[1152] In aspects, gDP(s) comprise chimeric gDS(s) comprising portions of gDS(s) of 2+ gD homologs, such as HSV-1 gD and HSV-2 gD, PRV gD and HSV-1 gD, or Canid alphaherpesvirus 1 (CaHV-1) gD and feline herpesvirus-1 (FHV-1) gD. Suitable combinations of sch gDS(s) can function without exhibiting related or similar sequence composition (although such chimeric gDS will typically exhibit structural similarity to one or both counterpart gDS(s) (structural similarity is DEH). In one example of such an AOTI, a construct encodes an N-terminal portion of HSV-2 that replaces SMGAOA known/expected HVEM-binding domain of HSV-1 (e.g., residues 26-57 or 26-58 of HSV-1) combined with a C-terminal portion comprising, e.g., one of SEQ ID NOs: 56, 57, 58, 71, 72, 73, or 74. A chimeric gDS can comprise, e.g., a nectin-1 RBD that is a chimera of a HSV-1/HSV-2 gD RBD & a PRV RBD.

[1153] In aspects, gDP(s) in CEPs comprise 1+ variants of WT gDS(s) (gDV(s)). gDVS(s) are RVRHROSI, SVSHSSOCE, or both to 1+ WT gDS. In AOTI, a gDVS is RVRHROSI to an HSV gD (e.g., HSV-1 gD). In aspects, a gDVS is RVRHROSI to HSV-2. In aspects, gdVS(s) are RVRHROSI, SVSHSOCE, or both to at least one WT non-HSV gD homolog. In aspects, a gDVS is RVRHROSI to PRV gD. In aspects, a gDP comprises 2+ gDVS that are respectively RVRHR or SI to sequences of 2+ WT gDPs.

[1154] In aspects, gDP(s) of CEPs DOS bind to Nectin-1, a Nectin-1 homolog, or both. In aspects, gDP(s) comprise RBDs of a WT gDP that bind Nectin-1/Nectin-1 homolog, a chimera of 2+ such gDPs, a FF of such WT gDD(s), or a FV of such gDS(s)/gDD(s). FFs of such gDS(s) typically are RVRHR or SI, SVSHS or CE, or both, to Nectin-1-binding or homolog-binding WT gDS(s). In aspects, variant gDS(s) that serve as Nectin-1/homolog RBD(s) in gDP(s) exhibit DOS higher affinity for Nectin-1, a Nectin-1 homolog, or both, than the counterpart WT gDS. Examples of such gDS(s) are in PRV, HSV-2, and BHV-1, although BHV-1 gD Nectin-1 RBDs exhibit low affinity and FVs of BHV-1 gD Nectin-1 RBDs exhibit enhanced affinity (SFE Connolly S A et al. Virology. 2001; 280(1):7-18. doi:10.1006/viro.2000.0747).

[1155] While gDV(s) can exhibit identity, similarity, or both to any suitable 1+ WT gDS(s) (e.g., those DEH), characterization of many aspects of gDS(s) and gDP(s) in this disclosure will be exemplified in reference to HSV-1 gD. This practice is used herein for exemplification and conciseness only and any such disclosure will be understood to simultaneously and implicitly provide support for corresponding gDS(s)/gDP(s) of or that are related to HSV-1 gD homologs, such as those DEH. In some parts of this disclosure explicit reference will be made to gD homologs to reinforce that the scope of this disclosure is not limited to HSV-1 gD-related or even HSV gD-related gDPs/gDSs.

[1156] gDP domains can be defined by function (e.g., RBDs), structure (e.g., immunoglobulin folds), or both (e.g., gDSSs). Functional & structural domains can overlap, as can different functional domains. Identifiable domains in HSV-1 gD, e.g., include: (1) in immature gDPs (igDPs) a gDSS (e.g., AAs 1-25); (2) an ectodomain, which typically is made up of (a) an N-terminal flexible region/domain (AAs ˜26-58), which can comprise all or parts of RBD(s) (discussed below); (b) a core domain (AAs ˜59-280) comprising an Ig-like V fold subdomain (AAs ˜80-210) and N-terminal and C-terminal flanking regions (AAs ˜59-79 and ˜211-280), which also can comprise part/all of RBD(s); (c) a flexible C-terminus domain (FCTD) (AAs ˜281-340), most of which is made up by a functionally-defined profusion domain (AAs ˜285-335), comprising 2 subdomains (PFD1, PFD2—AAs 285-310 and ˜310-335, respectively), and can comprise a N-terminal flexible region (NTFR) “shielding domain” (NTFRSD) when the gDP is in an unbound (receptor-free) state (AAs ˜313-331); and (d) a functional Glycosylphosphotidylinositol (GPI) anchoring domain (AAs 234-337) comprising a secretion promoting subdomain (234-294), overlapping parts of both the core domain & FCTD; (3) a transmembrane domain (TMD) (AAs ˜340-361); and (4) an intravirion/cytoplasmic domain (AAs ˜362-394) comprising an Arg/Lys rich anchor subdomain (AAs ˜365-381).

[1157] The use of the modifier ˜ in connection with the preceding description of WT gDDs arises from variations in gDPs & various characterizations of these domains in the art (though there is general agreement about the core of most of such gDDs). Precisely defining gD RBDs is similarly challenging. E.g., in HSV-1 gD RBDs for HVEM & Nectin-1 are known to partially overlap, but there also is ample evidence that FFs of gDs that do not bind HVEM can effectively, comparably, and in some cases improvingly bind Nectin-1 (SFE Connolly S A, et al. J Virol. 2003; 77(14):8127-8140. doi:10.1128/jvi.77.14.8127-8140.2003). As such, RBDs herein can be defined by WT AARSs and FVs thereof that are expected to be sufficient for binding to a referenced receptor, while additional AAs can in cases enhance such binding.

[1158] Applying this principle to defining the RBDs of HSV-1 gD (gDRBDs), a HVEM-binding domain (HVEMBD) herein means ˜AAs 28-48 (e.g., AAs 26-48). The Nectin-1 RBD (N1BD) of HSV-1 gD is less well defined, but herein means either residues 59-285 or a part thereof (e.g., a sequence defined by N-terminal residue ˜AA 59 and ending at about AA 235, 240, 245, 250, 260, 265, 268, 280, or 285. An overlapping domain that contributes to HVEM binding, N1 binding, or both, but which typically is not sufficient for binding either gDR independently is located in positions corresponding to HSV-1 gDs ˜AAs 49-58. The overlapping domain gDS can be AW a HVEMBD or N1BD (e.g., a N1BD can comprise AAs 48-285, 48-268, 48-265, 48-260, or 48-250. Functions of an overlapping domain comprise enhancing RBD(s) or to maintaining positioning of RBD(s) similar to positioning of WTC gDD(s) in WT gDP(s).

[1159] Further exemplifying how disclosure WRT to HSV-1 gDS(s) can be adapted to other gDD(s), in aspects gDP(s) comprise a PRV N1BD or a FV thereof corresponding to GASAOA (or being RVRHRSI/SVSHSOCE) to PRV AAs 19-350 or a fragment thereof such as AAs 20-340, 20-330, 20-300, 20-280, 20-260, or 20-250. In aspects, gDP(s) comprise a FV of a PRV N1BD in which AAs corresponding to MGASAOA of F29, W40, T137, Y201, Y216, M219-R220, P224 (or P224-Y226), V324, and Y237 of PRV gD are maintained.

[1160] gDS(s) that characterize gDP(s) exhibit 1+ defined function(s), such as receptor binding, checkpoint inhibition, ER processing promotion, placement of other gDDs, etc. However, gDS(s) of or related to a WT gDS can exhibit such properties or can exhibit such properties when combined with 1+ heterologous gDS(s) (e.g., a chimeric gDRBD that can bind gD receptor(s)), such that while only portion(s) of such a chimeric or chimeric-like gDS is RVRHRSIOI to any WT gDS it is a suitable gDS as it exhibits 1+ measurable gDS function(s). Functionality of a gDS FF or variant sequence (gDVS) can differ from a WT counterpart. In aspects, a gDS FF or gDVS exhibits suitable, comparable, or improved function(s). In aspects, a gDS FF/gDVS exhibits OSMOA of the functions of its WT counterpart. In aspects, a gDS FF or gDSVS exhibits <all functions of a corresponding WT AARS. Functions of gDS(s) include (1) gDSS functions; (2) receptor binding (e.g., nectin-1, nectin-2, or HVEM) (in gDRBD(s)) and target cell-binding (e.g., DCs, T cells, epithelial cells, or fibroblasts); (3) promoting uptake of the associated gDP (e.g., in a gDFP, such as a gDAgFP); (4) enhancing ER processing of the gDP; (5) enhancing GPI anchoring (6) membrane association (in a gD TMD); or (7) any other measurable function associated with gDD(s) or combinations of any such functions. As DEH, gDP(s) can include non-functional WT gD AARSs or FVs thereof, but such AARS(s) do not characterize the gDP unless explicitly stated. gDP(s) also can comprise gDD(s) that are not discussed in detail herein but that exhibit function(s) (e.g., gDP(s) can be characterized on the inclusion of gDS(s) that DOS contribute or cause oligomerization/dimerization of gDP(s)). Typical functional and structural gDD(s) of gDPs are briefly discussed in turn below.

### a. gD Signal Sequence AARSs/PPTs

[1161] In aspects, gDPs comprise gDSS(s). In aspects, CEPs, gDPs, or both comprise 2+ gDSSs, such as in immature gDPs comprising two gDP portion(s) separated by SCS(s), or where a CEP comprises two different types of gDPs, such as 2+ gDPAgFPs. In aspects, CEPs or gDP(s) in CEPs comprise only 1 gDSS. In aspects, gDP(s) in CEPs do not comprise any gDSS. In aspects where no gDSS is in a CEP, gDP(s) can comprise heterologous signal sequence(s), such as those DEH or are known in the art. gDPs can comprise any suitable type of gDSS. In aspects, gDPs comprise FLWT gDSS(s). In aspects, gDPs comprise a gDSS that is a FF of WT gDSS(s) or a chimeric gDSS. In aspects, gDPs comprise a gDSS that is a FV of either thereof, such as GSRV gDSS(s). gDSS(s) are typically positioned in the N-terminus of an immature gDP and are typically directly attached to an adjacent sequence. In aspects, the adjacent sequence is a gDRBD sequence or an ETS. In aspects, gDPs comprising a gDSS comprise 1, 2, 3, 4, or more additional gDDs. In aspects, gDPs comprising a gDSS comprise no other gDDs. Examples of WT gDSs include MDV-gD AAs ˜1-34 (e.g., GenBank Q9E6L6.1/Uniprot Q6764); AAs ˜1-17 of suid alphaherpesvirus 1 (e.g., GenBank: AA062939.1); AAs ˜1-19 of EHV-1 gD (e.g., Uniprot Q6DLD9); or AAs ˜1-18 of BHV-1 gD (e.g., Uniprot POCK29). In aspects, inclusion of the gDSS DOS enhances distribution of the associated PPT(s) in TR(s), level of IR(s), or both.

### b. Hairpin Forming Domain

[1162] In AOTI, OSMGAOA gDP(s) in CEPs comprise domain(s) capable of forming a hairpin structure under typical TR conditions. In AOTI, such a hairpin forming domain (HFD) is RVRHRSIOI, SVSHSOCE, or both to the WT HFD of HSV-1 gD (AAs ˜26-47). In aspects, in which a gDP comprises sequence(s) of or RVRHRSIOI/SVSHSOCE to a PFD or relevant portion thereof (a “displaced subdomain”), at least part of the HFD DOS is AW such a PFD AARS, at least when the gDP is not bound to gDR(s) in the case of gDPs comprising overlapping RBD(s) (e.g., a HVEM RBD). Determination of hairpin formation can be made by structural studies as DEH and KITA (e.g., Connoly et al., J Virol. 2003). In aspects, OSMGAOA gDP(s) in CEP(s) lack a functional HFD or lack any sequence that is RVRHRSIOI, SVSHSOCE, or both to the HFD of a WT gD, such as the HFD of a WT HSV-1 gD. HFDs may be lacking/insufficient to serve as RBDs in other WT gDs. E.g., in PRV N-terminal loop of gD is only about half the size of HSV-1 gD, which has been attributed to the inability of PRV to bind HVEM. SFE Li A et al. PLoS Pathog. 2017; 13(5):e1006314. doi:10.1371/journal.ppat.1006314. In aspects, HFDs are within about 85-125%, 90-110%, or 95-105% of the size of the HFD of HSV-1 gD. In aspects, a HFD is capable of binding HVEM suitably, comparably, or improvingly WRT to HSV-1 gD. In AOTI, a HFD is not capable of DOS binding HVEM.

### c. gD RBDs

[1163] In aspects, OSMGAOA gDP(s) in a CEP comprise gDRBD(s). gDP(s) can comprise any suitable number of any suitable type(s) of gDRBD(s) that bind any suitable gD receptor (gDR). a gDRDB herein is characterized as the minimum AARS that is sufficient to exhibit at least suitable/adequate, and typically at least comparable binding to a gD receptor (gDR) as a WT gD. In aspects, gDP(s) can comprise a single AARS that comprises multiple gDRBDs. For example, a gDP can comprise AAs ˜26-280 of HSV-1 gD which comprise most/all of all three RBDs in HSV-1 gD or a FF/FV thereof that exhibits multiple receptor binding function(s).

[1164] In AOTI, gDP(s) in CEPs bind 2 or more gDRs. In aspects, gDP(s) bind only a single gDR (e.g., only HVEM, only nectin-1 (N1), or only nectin-2 (N2)). In aspects, the only gD receptor gDP(s) bind is N1, N2, or HVEM. In aspects, gDP(s) bind N2 and N1, but not HVEM. In aspects, gDP(s) bind N2, but not N1 and not HVEM. In aspects, gDP(s) bind N1, but not HVEM or N2. In aspects, gDP(s) at least adequately or at least comparably bind 30SHS. In aspects, gDP(s) do not bind 30SHS. In aspects, gDP(s) bind 1+ WT gDR(s) other than HVEM, a nectin, or 30SHS. In aspects, gdP(s) bind a MHC gDR.

[1165] gDP(s) can comprise gDRBD(s) of or that are RVRHRSIOI/SVSHSOCE to WT gD RBD(s) of any suitable a-HV gD or FFs thereof, and gDP(s) can comprise functional chimeric RBD(s). Most a-HV comprise gDs (a notable exception is human alphaherpesvirus 3 (HHV-3), usually referred to as the varicella-zoster virus (VZV)). Most gDs bind either HVEM or a HVEM/homolog, a Nectin (e.g., a Nectin-1 (e.g., HSV-1, HSV-2, PRV, SuHV-1, BHV-5, and BHV-1), Nectin-2 (PRV, HSV-2, and mutant HSV-1), or nectin-like-5/CD155 (e.g., PRV and BHV-1), or 3-O-sulphated heparan sulphate receptor (“30SHS”) (e.g., HSV-1, but not BHV-5) (SFE Krummenacher C et al in Madame Curie Bioscience Database. Austin (Tex.): Landes Bioscience; 2000-2013. https://www.ncbi.nlm.nih.gov/books/NBK6257/ and Levings, R., graduate thesis, Iowa State Univ., 2012, https://lib.dr.iastate.edu/etd/12862/). The HSV-1 gDRBDs for Nectin-1, HVEM, and 3-O-S HS are DEH, as are select examples of RBDs for such receptor(s) in other α-HV gDs. In aspects, gDS(s) comprise other gD RBD(s). E.g., a EHV-1 gDRBD, EHV-4 gDRBD, or RVRHRSI FV gDRBD can comprise a MHC I RBD. See Azab W et al. J Virol. 2012; 86(4):2031-2044. doi:10.1128/JVI.06555-11. Aspects of RBDs usable or adaptable to the design/selection of RBD(s) in gDP(s) of CEPs are discussed in numerous references cited elsewhere here and in, e.g., Spear P G, et al. Virology. 2006; 344(1):17-24. doi:10.1016/j.virol.2005.09.016. In aspects, OSMGAOA gDP(s) in CEPs lack any gDRBD. In aspects, OSMGAOA gDP(s) in CEPs comprise ≥1 gDRBDs, ≥2 gDRBDs, or ≥3 gDRBDs. In aspects, OSMGAOA of the gDRBDs in CEPs comprising ≥2 gDRBDs are from WT gDS(s) or are RVRHROSI to gDRBDs of the same α-HV. In aspects, 2 gDRBDs in a CEP are from WT gDS(s) or are RVRHROSI to gDRBDs of two different species of α-HV (e.g., PRV and HSV-1). Examples and aspects of RBDs are DFEH.

### 1) HVEM RBD/Binding Characteristics/Checkpoint Inhibition

[1166] In aspects, OSMGAOA gDP(s) in CEPs bind HVEM with a suitable, comparable, or improved affinity as compared to a corresponding WT HVEM-binding gDP (e.g., HSV-1 gD) and, accordingly, in aspects OSMGAOA of gDP(s) in a CEP comprise ≥1 HVEM-binding gDRBD(s). In aspects, OSMGAOA of such gDP(s) exhibit CI activity in HVEM-expressing TRs. In aspects, a HVEM-binding RBD is identical to a WT gDRBD. In aspects, a HVEM-binding RBD is a FV that is RVRHROSI to a WT HVEM-gDRBD. E.g., in one aspect a HVEM-gDRBD is a FV of an HSV-1 HVEM-gDRBD that comprises a variation at AA 22. In aspects, a CEP comprises gDP(s) comprising HSV-1 gD HVEM-gDRBD FVs in which G47, Y48, P42, K51, Q52, and G59 are maintained, and optionally further in which OSMGAOA of AAs 36, 37, 40, 53, and 54 is maintained. In aspects, GAOA of AAs 32-40, 49-57, or both of HSV-1 are maintained. In aspects, HSV-1 gD AA 27 39, or 47 are also/alternatively maintained, with such residues DOS contributing to HVEM binding. In aspects, CEPs comprise a FV HVEMBD in which OSMGAOA of the AAs in positions 43, 45, 46, and 49, and OSMGAOA of the residues in overlapping domain AAs 50, 55, 56, 57, or 58 (L, K, S, P, G, E, L, or T, respectively) are substituted with a suitable substituting AA (e.g., an Ala). In aspects, AAs 101, 99, 64, 61, and 60 in the Nectin-1 RBD also are maintained and DOS enhance HVEM binding of such a gDP. In aspects, a FV HVEMBD comprises a sequence according to the formula of SEQ ID NO: 719. In aspects, no more than 75% (6/8), no more than 50% (4/8), or nor more than 3, 2, or 1 of such X AAs varies from corresponding AA(s) in HSV-1 gD.

[1167] In aspects, a gDP comprising a HVEMBD lacks SMGAOA of any gD PFD (e.g., most, generally all, substantially all, or all of any residues corresponding to residues 315-324, 310-324, 315-394, or AAs 310-394 of HSV-1 gD). In aspects, such gDP(s) exhibit significantly enhanced affinity for HVEM than WT HSV-1 gD (e.g., at least 2×, 5×, 10×, 20×, 50×, 75×, or 100× greater affinity). In aspects, a gDP comprises a gDS in which MGAOA of such a portion of the PFD is maintained but in which one or more substitutions are introduced that DOS enhance HVEM affinity (e.g., substituting W319 with a different residue, e.g., Ala). In aspects, such gDP(s) exhibit significantly improved K_{ON}values as compared to WT HSV-1 gD with respect to HVEM binding. In aspects, any such gD may maintain portion of a PFD or adjacent sequence comprising, e.g., AAs 259-300 of HSV-1 gD or a RVRHROSI sequence. In aspects, such gDP(s) exhibit a significantly lower K_{off} than gDP(s) lacking such a sequence. In aspects, a HVEMBD gDP that comprises a core domain comprises substitution(s) at AAs corresponding to AAs 165, 240, 247, 248, or 256 of HSV-1 gD, in aspects at least 2 or 3 thereof, the substitutions resulting in DOS enhanced HVEM binding as compared to WT HSV-1 gD.

[1168] In aspects gDP(s) comprising a HVEMBD & a PFD do not include any insertions of ≥12, ≥10, 2 8, ≥7, more than 6, more than 5, or more than 3 residues between the HVEMBD and PFD. In aspects, gDP(s) comprising a HVEMBD & a PFD comprise no insertions that DOS reduce HVEM binding.

[1169] In aspects, a gDP exhibits a KD of about 0.5-6.5 (e.g., ˜2-6)×10⁻⁶ M for HVEM, a Kₒₙ of about 3-150 (e.g., ˜50-150)×10³ M WRT to HVEM, a K_{off} of 1-6 (e.g., ˜3-6)×10⁻² M WRT to HVEM, or a combination thereof. Methods for assessing HVEM binding are described in, e.g., Rux A H et al. Journal of Virology. 1998 September; 72(9):7091-7098; Lazear E et al. Virology. 2014; 448:185-195. doi:10.1016/j.virol.2013.10.019; and other references DEH. In gDP(s) lacking a functional HVEMBD, such gDP(s) can exhibit DOS lower affinity characteristics than these minimum characteristics.

[1170] In AOTI, gDP(s) of CEPs comprising a HVEMBD(s) exhibit DOS gD CI effects in HVEM-expressing TRs (“HVEM TRs”). In aspects, gDP(s) bind HVEM with at least comparable affinity as BTLA or a BTLA homolog binds HVEM. In AOTI, gDP(s) bind HVEM with DOS greater affinity than exhibited by BTLA PPTs in cells or TRs (or population of similar cells or TRs, e.g., as determined by a statistically significant population in an in vivo or in vitro study). In AOTI, such gDP(s) in CEPs DOS induce enhanced antigen specific IR(s).

[1171] In AOTI, CEPs comprise LIGHT PPT(s) that DOS enhance(s) IR(s). In aspects, methods comprise the use of such LIGHT PPT(s) or other stimulators of a HVEM-mediated checkpoint pathway as A. In aspects, CCs comprise such LIGHT PPT(s) or HVEM pathway activator(s) as CCCs.

[1172] In aspects, OSMGAOA of gDP(s) in a CEM comprising HVEMBD(s) comprise less than an all of the gDD(s) in any WT gD(s) related to the HVEMBD(s) (e.g., in aspects gDP(s) comprise that comprise a HSV-1 HVEMBD or a FV thereof and lack one or more other domains corresponding to the other domains of HSV-1 gD, such as a nectin-1 RBD, a PFD, a TMD, or an intravirion domain. In aspects, CEPs comprise gDP(s) that consist or consist essentially of HVEM RBD(s) (WT or FV) or in which the only gDD(s) are HVEMRBD(s).

[1173] In aspects, OSMOA gDP(s) in CEPs lack any HVEMBD that binds HVEM in a comparable or better manner (e.g., a reduction of 50%, 65%, 75%, 90% or more) (e.g., a HSV-1 gD lacking AAs 32-40 or suitable substitutes therefore may exhibit a 90% reduction in HVEM binding). In aspects, OSMGAOA gDP(s) in CEPs lack any gDD that exhibits significant binding of HVEM, HVEM-mediated checkpoint inhibition in TR(s), or both. In aspects, gDP(s) in CEPs do not exhibit HVEM-mediated checkpoint inhibition, significant HVEM binding, or both. In aspects, OSMGAOA gDP(s) in CEPs lack any gDS(s) including AARS(s) that is related or similar to any EL WT gD HVEMBD.

### 2) Nectin-1 RBD/Binding Characteristics

[1174] In AOTI, gDP(s) in CEPs comprise N1BD(s). In aspects, gDP(s) comprise ELWT gD N1BD(s). In aspects, gDP(s) comprise FFs of such gDS(s). In aspects, gDP(s) comprise chimeric N1BD(s) (e.g., a PRV & HSV-1 N1BD).

[1175] In aspects, gDP(s) comprise FV(s) of a WT N1BD AARS that is RVRHROSI to a WT gD N1BD (e.g., HSV-1 gD, BHV-1 gD, or PRV gD). In aspects, a FV N1BD is RVRHROSI to the WT HSV-1 gD N1BD. In aspects, such a FV N1BD retains AAs corresponding to Tyr63, Asp240, Arg247, and Phe248 of HSV-1 gD or AAs that correspond in function, position, or both in HSV-1 gD.

[1176] In aspects, gDP(s) exhibit an affinity for Nectin-1 that is comparable or superior to the affinity between CD96 and Nectin-1 in TR(s). In aspects, gDP(s) exhibit affinity for Nectin-1 that is DOS less than the affinity of CD155 for Nectin-1 in TR(s).

[1177] In AOTI, gDP(s) comprise a sequence that is RVRHRSIOI, SVSHSOCE, or both to SEQ ID NO:56 (residues 58-255 of HSV-1 gD). In aspects, gDP(s) comprise a gDS that is RVRHRSIOI, SVSHSOCE, or both to SEQ ID NO:57 (residues 58-269). In aspects, gDP(s) comprise a gDS that is RVRHRSIOI, SVSHSOCE, or both to SEQ ID NO: 72 (residues 58-290), SEQ ID NO:71 (residues 58-302); SEQ ID NO:58 (residues 58-313); or SEQ ID NO:73 (residues 58-340). In AOTI, gDP(s) comprise a gDS that is RVRHRSIOI, SVSHSOCE, or both to SEQ ID NO:53 (residues 55-255 of HSV-1 gD); SEQ ID NO:54 (residues 55-269); SEQ ID NO:55 (residues 55-313); or SEQ ID NO:69 (residues 55-340). In AOTI, gDP(s) comprise a gDS that is RVRHRSIOI, SVSHSOCE, or both to SEQ ID NO:50 (residues 48-255 of HSV-1 GD); SEQ ID NO:51 (residues 48-269); SEQ ID NO:64 (residues 48-302); SEQ ID NO:52 (residues 48-313); or SEQ ID NO:64 (residues 48-340 of HSV-1 gD). In AOTI, gDP(s) comprise homologous N1BD sequence(s) from a non-HSV-1 gD.

[1178] In aspects, gD(s) comprise both N1BD(s) and HVEMBD(s). In one such aspect, gDP(s) comprise a gDS that is RVRHRSIOI, SVSHSOCE, or both to SEQ ID NO:40 (residues 26-255); SEQ ID NO:35 (residues 26-269); SEQ ID NO:45 (residues 25-313); or SEQ ID NO:82 (residues 26-340). In aspects, gDS(s) comprise a HVEM1BD, N1BD, or both, which are RVRHRSIOI/SVSHSOCE to homologous gD sequences from a non-HSV-1 WT gD.

[1179] In aspects, a first mature gDS (a gD1) of a mature gDP, PCGCOSCOOCO a HVEMBD, a N1BD, or combined HVEMBD&N1BD gDS, and the gDP comprises one or more gDS(s) downstream of such gD1 sequence (e.g., a gD2 sequence). E.g., in aspects, a gDP comprises an above-described HSV-1 gD or HSV-1 gD related HVEMBD, N1BD, or combined HVEMBD-N1BD gDS as a gD1 sequence and a second gDS (a gDS-2 sequence) that is RVRHRSIOI/SVSHSOCE to a portion of a WT gD, such as HSV-1 gD, that begins at a position corresponding to the position following the C-terminus of the gDS in gD-1 or a position that is 2, 3, 4, 5, 6, 7, 8, 9, 10, 12, 15, 16, 18, 20, 22, or 25 residues downstream of such residue, and that ends at a position corresponding to HSV-1 gD residue 394, residue 375, residue 360, or residue 350, residue 340, residue 335, residue 315, residue 310, residue 308, residue 300, residue 290, or residue 285 of HSV-1 gD. In aspects, such a gDP is a gDFP comprising one or more intervening AARSs positioned between the gD1 and gD2 portions of the gDP. In aspects, the inclusion of such intervening sequences does not prevent the gDD(s) of the gDP from exhibiting suitable, comparable, or improved functionality as compared to the WT counterpart gDD(s). In aspects, such a gDFP is a gDAgFP comprising one or more Ag sequences positioned between gD1 and gD2, such as at least 2, 3, 4, 5, 6, 8, or 10 Ag(s), which are optionally AW PTPS(s), SCS(s), FL(s)/MSL(s), or CT.

[1180] In aspects, CEPs comprise gDAgFP(s) comprising a gD1 as described above (e.g., SEQ ID NO:57 (residues 58-269 of HSV-1 gD); SEQ ID NO: 72 (residues 58-290), SEQ ID NO:71 (residues 58-302); SEQ ID NO:58 (residues 58-313); or SEQ ID NO:73 (residues 58-340), or a FF or FV of any thereof) and that further comprise a gD transmembrane domain (e.g., residues 341-361 of HSV-1 gD or a homologous sequence or a FF or FV of either) or cytosolic/ectodomain (e.g., residues 361-394 of HSV-1 gD or a homologous sequence or a FF or FV of either) (e.g., SEQ ID NO:66 (corresponding to residues 48-394), SEQ ID NO:83 (corresponding to mature HSV-1 gD, residues 26-394), or SEQ ID NO:70 (corresponding to residues 55-394 of HSV-1 gD). In aspects, Ag(s) can be directly or indirectly bound to the gD sequence upstream of the gD sequence(s), downstream of the gD sequence(s), or both. In AOTI, OSMGAOA Ag(s) in the gDP are downstream of any gDS in the gDP.

[1181] In aspects, gDP(s) comprise an intervening heterologous AARS between a HVEMBD and a N1 BD. In aspects, such an insertion occurs at a position corresponding to residue 47 of HSV-1 gD.

[1182] In aspects, any insertions of heterologous AARSs in a N1BD do not eliminate suitable or comparable Nectin-1 binding. In aspects, any such insertions do not DOS reduce N1 binding. In aspects, no heterologous AARS of more than 15 AAs, no more than 10 AAs, no more than 5 AAs is inserted between any gDS that is RVRHRSIOI to AAs 59-240 of HSV-1 gD in a gDP.

[1183] In aspects, a gDP binds Nectin-1 with at least 1.5×, at least 2×, at least 2.5×, at least 3×, at least 4×, or at least 5× the affinity of WT HSV-1 gD (e.g., at least 7, 8, or 9× the affinity). In aspects, such a gDP comprises a Nectin-1 binding domain that is more related to the N1BD of PRV gD than HSV-1 gD. Aspects of determining affinities and relative aspects of PRV, BHV-1, and HSV gDs are described in, e.g., Connolly S A et al. Virology. 2001; 280(1):7-18. doi:10.1006/viro.2000.0747. Nectin-1 binding characteristics adaptable to this aspect are described in Li A et al. PLoS Pathog. 2017; 13(5):e1006314. Published 2017 May 19. doi:10.1371/journal.ppat.1006314

[1184] Other N-terminal first sequence (gD1) and C-terminal (gD2) second sequence combinations that can be for internal antigen sequence gD fusion protein constructs that can be used in some compositions and methods of the invention are provided in the Wistar Art (SFE Col. 8 of U.S. Pat. No. 8,962,816). In aspects, the gDP comprises gD1 and gD2 sequences that is not described in the Wistar Art (e.g., by inclusion of different residues, smaller gDs that are FFs, or FVs not contemplated in the Wistar Art). In aspects, gDP(s) lack one or more residues or sequences associated with HVEM binding, lack a gD intravirion/cytosolic domain, lack a TMD, comprise Ag(s) that are positioned downstream of any gDS in the FP, initially comprise a gDSS, or comprise combinations of such features.

[1185] In aspects, gDP(s) comprising a N1BD lack a gD TMD & cytosolic domain. In aspects, such gDP(s) exhibit DOS higher affinity for Nectin-1 than gDP(s) with such gDDs.

[1186] In aspects, gDP(s) comprising a N1BD, HVEMBD, or both, lack any gDS corresponding to residues 310-394 of HSV-1 gD. In aspects, such gDP(s) exhibit DOS enhanced binding for one or both gD receptors. In aspects, such gDP(s) exhibit at least 10×, at least 20×, at least 30×, or at least 50× affinity for Nectin-1 than WT HSV-1 gD.

[1187] In aspects, a gDP comprises a heterologous ETS upstream of a N1BD, in essence taking the place of the HVEMBD in HSV-1 gD. E.g., a DEC-205-binding domain can be located in such a position, such as a DEC-205-binding keratin AARS.

[1188] In aspects, the N1BD comprises up to about residue 250 of HSV-1 gD or a corresponding residue of a homolog or FV. In aspects, residues 240, 247, and 248 of HSV-1 gD are maintained as part of the N1BD. In aspects, such gDP(s) exhibit DOS enhanced binding of Nectin-1 due to the presence of such residues. In aspects comprising a HVEMBD or 30SHSBD, such residues are deleted, or such a section is deleted/not present (e.g., residues corresponding to AAs 240-250 of HSV-1 gD are deleted,) and the associated gDP exhibits DOS enhanced binding of HVEM, 30SHS, or both.

[1189] In aspects, gDP(s) comprise a FV of an HSV-1 gD N1BD. In aspects, SMGAOA of the AAs corresponding to R61, V62, Y63, H64, Q157, R159, and V239,of HSV-1 gD are retained (in this disclosure WT gD AAs are counted from the first residue of the gDSS). In aspects, SMGAOA of AAs S241, 1242, G243, M244, L245, N252, T255, V256, and Y259 also are retained. In aspects, all of V2229-V248 are retained. In aspects, OSOA of AAs P48, L50, and Q52 of/near the overlapping domain are also retained. In aspects, Q101, N102, and M110 are retained. In AOTI in which a gDP comprises HVEMBD and N1BD sequences at least related to HSV-1 gD counterparts both L50 and Q52 are retained & both residues contribute to both Nectin-1 and HVEM binding. In aspects, gDPs comprise an HSV-1 N1BD FV that comprises substitutions at residues corresponding to OSMOA of T91, N107, S109, or F154. In aspects, gDPs comprise N1BD FVs that has substitutions at positions corresponding to HSV-1 AAs 59, 240, 247, or 248. In aspects, AAs corresponding to OSMOA of HSV-1 gD AAs 107, 109, 154, 240, 247, or 248 are retained.

[1190] Exemplifying how such principles can be extended to other α-HV gDS(s) & gDSVs, in aspects gDP(s) comprise an HSV-2 gD N1BD (HSV-2 gD AAs 48-258). In aspects, gDP(s) comprise a FV of a HSV-2 N1BD that is RVRHROSI/SVSHSOCE to HSV-2 N1BD & that retains AAs corresponding to MGAOA of HSV-2 gD AAs P48, L50, D51, Q52, R61, V62,Y63, H64, Q157, R159, P223, V229, D240, S241, 1242,G243, M244, L245, P246, R247, F248, N252, V256,&Y259.

[1191] In aspects, a gDP comprises an N1BD that comprises sequences that are VRHRSIOI to WT Nectin-1 BD patch 1 and patch 2 sequences or that are VSHSOCE and within about 5 angstroms of the patch 1 and patch 2 nectin-1 binding domains of HSV-1 gD or HSV-gD when structurally aligned (e.g., HSV-2 gD patch1 residues comprising P23, L25 to Q27, F223, N227, V231, and Y234 and HSV-2 gD patch 2 residues comprising R36 to H39, Q132, R134, P198, and V214 to R222).

[1192] In aspects, gDPs comprise a N1BD sequence according to the formula X1-X2-X3-X4-X5-X6-X7-X8-X9-X10-C-X12-X13-X14-X15-L-X17-X18-X19-X20-X22-X23-X24-X25-X26-X27-X28-X29-X30-X31-X32-X33-X34-X35-X36-X37-X38-W-X40-X41-X42-X43-X44-X45-X46-C-X48-X49-X50-X51-X52-X53-X54-X55-X56-X57-X58-C-X60-X61-X62-X63-X64-X65-X66-X67-C-X69-X70-X71-X72-X73-X74-X75-W-X78-X79-X80-X81-X82-X83-X84-X85-X86-X87-X88-X89-X90-X91-G-X93-X94-X95-X96-X97-P-X99-X100-X101-X102-G-X104-Y-X106-X107-X108-X109-X110-X111-X112-X113-X114-X115-X116-X117-X118-X119-X120-X121-X122, wherein (i) X2, X6, X7, X10, X15, X19, X23, X24, X27, X28, X42, X43, X44, X53, X57, X60, X64, X67, X69, X70, X73, X77, X79, X82, X86, X102, X110, X115, X116, and X117 can be any residue; (ii) X78 can be any residue or is absent; and (iii) X1 is V, T, or N, in one aspect is V or T; X3 is a Y or H; X4 an A, T, V, or L; X5 is a V, T, R, or I; X8 is empty or any residue (S); X9 is an R, A, D, or E; X12 is an R, D, G, or S; X13 is an S, M, V, F; X14 is V, L, or A; X17 is an N, I, or W; X18 is an A, S, or P; X20 is an S, P, T, or G; X21 is an E, Q, D, or N; X22 is an A, V, P, or I; X25 is I, T, L, V, or M; X26 is V, L, or I; X29 is an A, L, Q, or I; X30 is any 0-6 residues; X31 is a P, V, S, L or Q; X32 is any 0-7 residues; X33 is a Y or F; X34 is an N, R, D, or E; X35 is an L or A; X36 is a T, H, L, or S; X37 is an I, V, or L, X38 is an A, I, S or V; X40 is F or Y; X41 is R, K, or V; X45 is an N, G, D, A, or M; X46 is 0-6 of any residues; X48 is an A, G, E, or T, or is absent; X49 is an I, R, H, Y, or is absent; X50 is a P or L; X51 is a I, L, or M; X52 is a T, Y, L, or F; X54 is a M, I, R, or K; X55 is an E, D, or Q; X56 is a Y, F, or M; X58 is an E, D, N, or L; X61 is a Y, P, T, or D; X62 is an N, R, D, K, Q, or V; X63 is a K, Q, E, or R; X65 is an L or F; X66 is a G or S; X71 is an R, K, S, or Q; X72 is a T, N or S, in one aspect T or S; X74 is a P, G, S, D, or Q; X75 is an R, F, M, W, or Y; X80 is a Y, L, or S; X81 is a D, A, V, or T; X83 is an F, Y, T, or S; X84 is an S, A, M, or T; X85 is an A, Y, F, or L; X87 is an S, T, G, or G; X88 is an E, D, or R; X89 is a D or N; X90 is an N, E, or G; X91 is an L or A; X93 is a F or L; X94 is an L, I, V, or T; X95 is a M, I, F, or L; X96 is a H, A, V, M, or F; X97 is an A or S; X99 is an F, R, Q, P, or A; X100 is an E, L, F, or A; X101 is a T, V, N, or L; X104 is a T, Q, or L; X106 is an L, R, or T; X107 is an R or L; X108 is an L, A, V, or T; X109 is a V, L, or I; X111 is an I or V; X112 is an N, D, E, or G; X113 is a D, G, N, or R; X114 is a W, T, V, E, D, S, or F; X118 is a T, S, or A; X119 is a Q, D, or L; X120 is a F, I, or V; X121 is a I, M, L, or T; and X122 is a L, V, or F. (FORMULA 1). In aspects, such a gDP is a gDFP, such as a gDAgFP. In aspects, a gDP comprises a sequence according to the formula X1-X2-X3-X4-X5-X6-X7-X8-X9-X10-C-X12-X13-X14-X15-L-X17-X18-X19-X20-X22-X23-X24-X25-X26-X27-X28-X29-X30-X31-X32-X33-X34-X35-X36-X37-X38-W-X40-X41-X42-X43-X44-X45-X46-C-X48-X49-X50-X51-X52-X53-X54-X55-X56-X57-X58-C-X60-X61-X62-X63-X64-X65-X66-X67-C-X69-X70-X71-X72-X73-X74-X75-W-X78-X79-X80-X81-X82-X83-X84-X85-X86-X87-X88-X89-X90-X91-G-X93-X94-X95-X96-X97-P-X99-X100-X101-X102-G-X104-Y-X106-X107-X108-X109-X110-X111-X112-X113-X114-X115-X116-X117-X118-X119-X120-X121-X122, wherein X1 is V, T, or N, in one aspect is V or T; X2 is Y, R, K; X3 is a Y or H; X4 an A, T, V, or L; X5 is a V, T, R, or I; X6 is an L, S, P, Y, or R; X7 is an E, A, L, T, D, M, or V; X8 is empty or any residue (S); X9 is an R, A, D, or E; X10 is an A, P, N, S, or G; X12 is an R, D, G, or S; X13 is an S, M, V, F; X14 is V, L, or A; X15 is an L, A, V, or E; X17 is an N, I, or W; X18 is an A, S, or P; X19 is a P, D, F, I, E, or N; X20 is an S, P, T, or G; X21 is an E, Q, D, or N; X22 is an A, V, P, or I; X23 is an P, G, D, V, K, or E; X24 is a Q, R, Y, A, S, or D; X25 is I, T, L, V, or M; X26 is V, L, or I; X27 is an R, W, N, L, or S; X28 is a G, E, S, T, or A; X29 is an A, L, Q, or I; X30 is any 0-6 residues; X31 is a P, V, S, L or Q; X32 is any 0-7 residues; X33 is a Y or F; X34 is an N, R, D, or E; X35 is an L or A; X36 is a T, H, L, or S; X37 is an I, V, or L, X38 is an A, I, S or V; X40 is F or Y; X41 is R, K, or V; X42 is M, I, T, L, or V; X43 is G, E, A, S, T, or I; X44 is G, S, D, R, K, Q, or D; X45 is an N, G, D, A, or M; X46 is 0-6 of any residues; X48 is an A, G, E, or T, or is absent; X49 is an I, R, H, Y, or is absent; X50 is a P or L; X51 is a I, L, or M; X52 is a T, Y, L, or F; X53 is a V, Y, F, L, or R; X54 is a M, I, R, or K; X55 is an E, D, or Q; X56 is a Y, F, or M; X57 is a T, A, Y, R, or F; X58 is an E, D, N, or L; X60 is a S, E, D, Q, or G; X61 is a Y, P, T, or D; X62 is an N, R, D, K, Q, or V; X63 is a K, Q, E, or R; X64 is a S, H, V, P, E, or L; X65 is an L or F; X66 is a G or S; X67 is an A, Y, R, T, or E; X69 is a P, R, K, S, A, or L; X70 is an I, Y, R, V, L, M, or K; X71 is an R, K, S, or Q; X72 is a T, N or S, in one aspect T or S; X73 is a Q, P, T, L, or A; X74 is a P, G, S, D, or Q; X75 is an R, F, M, W, or Y; X77 is an N, D, W, S, L, K, or A; X78 is absent or is a S, T, R, E, P, or V; X79 is a Y, F, P, R, S, or D; X80 is a Y, L, or S; X81 is a D, A, V, or T; X82 is an S, G, M, K, or P; X83 is an F, Y, T, or S; X84 is an S, A, M, or T; X85 is an A, Y, F, or L; X86 is a V, P, T, I, or L; X87 is an S, T, G, or G; X88 is an E, D, or R; X89 is a D or N; X90 is an N, E, or G; X91 is an L or A; X93 is a F or L; X94 is an L, I, V, or T; X95 is a M, I, F, or L; X96 is a H, A, V, M, or F; X97 is an A or S; X99 is an F, R, Q, P, or A; X100 is an E, L, F, or A; X101 is a T, V, N, or L; X102 is an A, E, S, D, or Q; X104 is a T, Q, or L; X106 is an L, R, or T; X107 is an R or L; X108 is an L, A, V, or T; X109 is a V, L, or I; X110 is a K, Y, S, I, V, T, or Q; X111 is an I or V; X112 is an N, D, E, or G; X113 is a D, G, N, or R; X114 is a W, T, V, E, D, S, or F; X115 is a T, V, N, P, F, M, or A; X116 is an E, A, I, T, F, or Q; X117 is I, Y, L, V, S, or T; X118 is a T, S, or A; X119 is a Q, D, or L; X120 is a F, I, or V; X121 is a I, M, L, or T; and X122 is a L, V, or F (FORMULA 2). In aspects, a gDP comprises a sequence according to the formula V-X2-X3-X4-X5-X6-X7-X8-X9-X10-C-X12-X13-X14-X15-L-X17-X18-X19-X20-X22-X23-X24-X25-X26-X27-X28-X29-X30-X31-X32-Y-X34-X35-X36-X37-X38-W-X40-X41-X42-X43-X44-X45-X46-C₂-X48-X49-X50-X51-X52-X53-X54-E-Y-X57-X58-C₃-X60-X61-X62-X63-X64-X65-G-X67-C₄-X69-X70-X71-X72-X73-X74-X75-W-X78-X79-X80-X81-X82-X83-X84-X85-X86-X87-X88-D-X90-L-G-X93-X94-X95-X96-X97-P-X99-X100-X101-X102-G-X104-Y-X106-R-X108-X109-X110-X111-X112-X113-X114-X115-X116-X117-X118-X119-X120-X121-X122, wherein C₁-C₄ are cysteines (but numbered for convenience of reference); X2 is Y, R, K; X3 is a Y or H; X4 an A, T, V, or L; X5 is a V, T, R, or I; X6 is an L, S, P, Y, or R; X7 is an E, A, L, T, D, M, or V; X8 is empty or any residue (S); X9 is an R, A, D, or E; X10 is an A, P, N, S, or G; X12 is an R, D, G, or S; X13 is an S, M, V, F; X14 is V, L, or A; X15 is an L, A, V, or E; X17 is an N, I, or W; X18 is an A, S, or P; X19 is a P, D, F, I, E, or N; X20 is an S, P, T, or G; X21 is an E, Q, D, or N; X22 is an A, V, P, or I; X23 is an P, G, D, V, K, or E; X24 is a Q, R, Y, A, S, or D; X25 is I, T, L, V, or M; X26 is V, L, or I; X27 is an R, W, N, L, or S; X28 is a G, E, S, T, or A; X29 is an A, L, Q, or I; X30 is any 0-6 residues; X31 is a P, V, S, L or Q; X32 is any 0-7 residues; X34 is an N, R, D, or E; X35 is an L or A; X36 is a T, H, L, or S; X37 is an I, V, or L, X38 is an A, I, S or V; X40 is F or Y; X41 is R, K, or V; X42 is M, I, T, L, or V; X43 is G, E, A, S, T, or I; X44 is G, S, D, R, K, Q, or D; X45 is an N, G, D, A, or M; X46 is 0-6 of any residues; X48 is an A, G, E, or T, or is absent; X49 is an I, R, H, Y, or is absent; X50 is a P or L; X51 is a I, L, or M; X52 is a T, Y, L, or F; X53 is a V, Y, F, L, or R; X54 is a M, I, R, or K; X57 is a T, A, Y, R, or F; X58 is an E, D, N, or L; X60 is a S, E, D, Q, or G; X61 is a Y, P, T, or D; X62 is an N, R, D, K, Q, or V; X63 is a K, Q, E, or R; X64 is a S, H, V, P, E, or L; X65 is an L or F; X67 is an A, Y, R, T, or E; X69 is a P, R, K, S, A, or L; X70 is an I, Y, R, V, L, M, or K; X71 is an R, K, S, or Q; X72 is a T, N or S, in one aspect T or S; X73 is a Q, P, T, L, or A; X74 is a P, G, S, D, or Q; X75 is an R, F, M, W, or Y; X77 is an N, D, W, S, L, K, or A; X78 is absent or is a S, T, R, E, P, or V; X79 is a Y, F, P, R, S, or D; X80 is a Y, L, or S; X81 is a D, A, V, or T; X82 is an S, G, M, K, or P; X83 is an F, Y, T, or S; X84 is an S, A, M, or T; X85 is an A, Y, F, or L; X86 is a V, P, T, I, or L; X87 is an S, T, G, or G; X88 is an E, D, or R; X90 is an N, E, or G; X93 is a F or L; X94 is an L, I, V, or T; X95 is a M, I, F, or L; X96 is a H, A, V, M, or F; X99 is an F, R, Q, P, or A; X100 is an E, L, F, or A; X101 is a T, V, N, or L; X102 is an A, E, S, D, or Q; X104 is a T, Q, or L; X106 is an L, R, or T; X108 is an L, A, V, or T; X109 is a V, L, or I; X110 is a K, Y, S, I, V, T, or Q; X111 is an I or V; X112 is an N, D, E, or G; X113 is a D, G, N, or R; X114 is a W, T, V, E, D, S, or F; X115 is a T, V, N, P, F, M, or A; X116 is an E, A, I, T, F, or Q; X117 is I, Y, L, V, S, or T; X118 is a T, S, or A; X119 is a Q, D, or L; X120 is a F, I, or V; X121 is a I, M, L, or T; and X122 is a L, V, or F (FORMULA 3).

[1193] In aspects a gDP comprises a sequence according to any of the preceding Formulas (1-3) and gD sequence further comprises a sequence downstream of X122 according to the formula Xa-C-X(1)-X(2)-Xb-X(3)-C₆, wherein Xa is any 6 to 8 residues; X(1) is Y and F; X(2) is A or S; Xb is any 7 to 11 residues; and X(3) is A, L, or W (FORMULA 4). In aspects, one or more of C₁ and C₅, C₂ and C₆, and C₃ and C₄ form cysteine-cysteine double bonds. In aspects, all of C₁ and C₅, C₂ and C₆, and C₃ and C₄ form cys-cys double bonds.

[1194] In aspects, gDPs comprise a sequence according to any of the above-described formulas and the gD sequence further comprises a sequence downstream of the Formula 4 sequence according to the formula: V-X(4)-V-X(5)-X(6)-X(7)- G-X(8)- L-X(9)- P-X(10)-F-Xc-X(11)-V-X(12)-X(13)-X(14)-Y, wherein X(4) is any residue, in one aspect an S or T; X(5) is any residue, in one aspect an I; X(8) is any residue, in one aspect an M or a V; X(9) is absent or any residue; X(10) is any 1-2 residues, in one aspect comprising an E or a P; Xc is any 4-8 residues; X(11) is any residue, in one aspect a T or a V; X(12) is any residue, in one aspect an A or an N; X(13) is any residue; in one aspect a V, L, or is absent; X(14) is any residue, in one aspect an L or a W or is absent (FORMULA 5). In aspects, the Formula 5 sequence has a sequence according to the formula: V-T-V-D-S-I-G-M-L-X(9)-P-R-F-Xc-T-V-X(12)-X(13)-X(14)-Y (FORMULA 6). In aspects, the Formula 6 sequence further comprises a sequence according to the formula: S-Xd-G-V-T-V-D-S-I-G-M-L-X(9)-P-R-F-Xc-T-V-X(12)-X(13)-X(14)-Y, wherein Xd is any 5-6 residues (FORMULA 7). In aspects, the gD sequence further comprises a sequence downstream of the Formula 4 sequence according to the formula Xx-V-T-V-D-S-I-G-M-L-P-R-F-Xy-T-V-Xz-Y, wherein Xx is any 6-10 residues, in one aspect 9 residues; Xy is any 5-9 residues, in one aspect 6 residues; and Xz is any 0-4 residues, in one aspect 2 residues (FORMULA 8).

[1195] In aspects, the gDD sequence comprises a sequence upstream of the Formula 1, Formula 2, or Formula 3 sequence according to the formula: X.1-X.2-L-X.3-X.4-L-X(I)-V, wherein X.1 is any residue, in one aspect P or A; X.2 is any residue, in one aspect V or L; X.3 is any residue, in one aspect D or A; X.4 is any residue, in one aspect G or A; and X(I) is any about 7-9 residues (FORMULA 9). In aspects, the Formula 9 sequence comprises a sequence according to the formula: P-X.2-L-X.3-G-X.4-L-X(I)—V—Y-H (FORMULA 10). In aspects, the Formula 9 sequence comprises a sequence according to the formula: X.1-X.2-L-X.3-X.4-L-X(I)—V—X(II)—P-X.5-F-X.6-P-P-X.7-X.8-P-X.9-T, wherein X(II) is any 4-10 residues, X.5 is any residue or is absent, in one aspect T or is absent; X.6 is any residue, in one aspect Q or P; X.7 is any residue, in one aspect S or A; X.8 is any residue, in one aspect L or Y; and X.9 is any residue, in one aspect I or Y (FORMULA 11).

[1196] In aspects, a gDP comprise a sequence according to any of Formulas 1-3 further comprises a sequence upstream of the Formula 1, Formula 2, or Formula 3 sequence according to the formula: P-X-L-X-R-X-X-X-X-X-X-X-X-R-V-Y-H (FORMULA 12).

[1197] Features of this section overlap with the description of other sections below, particularly the core domain and N-terminal and C-terminal extensions thereof. In aspects, the N-terminal extension region of a core domain is materially, mostly, generally, or at least substantially composed of flexible AAs. Additional aspects relating to N1BDs, variants, and related methods and principles adapatable to such aspects are described in, e.g., Manoj S et al. Proc Natl Acad Sci USA. 2004; 101(34):12414-12421. doi:10.1073/pnas.0404211101; Martinez W M et al. J Virol. 2002; 76(14):7255-7262. doi:10.1128/jvi.76.14.7255-7262.2002; and Alves Dummer L et al. Vet Res. 2014; 45(1):111. doi:10.1186/s13567-014-0111-x.

[1198] As described above with respect to HVEMBD gDPs, N1BD gDPs can comprise “deletions” (truncations/omissions), substitutions, or both, of gDSs/AAs downstream of the N1BD. In aspects, such omissions/deletions or substitutions DOS enhance Nectin-1 binding of the gDP. In aspects, substitutions are made in AAs corresponding to AA 150, 151, 176, or 302 of HSV-1 gD. In aspects, gDP(s), such as N1BD, HVEMBD, or HVEMBD+N1BD gDP(s) lack AAs corresponding to AAs 305-325, 310-325, 305-335, 310-335, 305-340, 310-340, 305-361, 310-361, 305-394, or 310-394 of HSV-1 gD or corresponding AAs from a homolog related to gDS(s) of the gDP, such as a N1BD. In aspects, gDP(s) lack W319, either through substitution or deletion. In aspects, such gDP(s) exhibit DOS better affinity for receptor(s). In aspects, gDP(s) comprise a gDS corresponding to HSV-1 AAs 260-305, 280-305, or 285-305, but lack an AARS corresponding to AAs 310-335, 310-360, or 310-394.

[1199] In aspects, CEPs comprise gDP(s) comprising an N1BD that DOS competes with a TR Nectin-1 for binding to WT Nectin-1 (and DOS prevents Nectin-1:Nectin 1 dimer formation in some cases). In aspects, gDP(s) exhibit DOS better affinity for Nectin-1 than WT Necting-1. In aspects, gDP(s) exhibit at least 2×, 3×, 4×, 5×, or at least 10×, e.g., at least 20×, at least 30×, at least 50×, or at least 100× or higher affinity for Nectin-1 than Nectin-1.

[1200] In aspects, gDP(s) exhibit a K_{d} for Nectin-1 of at least 10 nM, at least 15 nM, at least 20 nM, or at least 25 nM. In aspects, gDPs exhibit a K_{d} for Nectin-1 of at least 50 nM, e.g., at least 100 nM, at least 120 nM (e.g., 110 nM-360 nM), at least 150 nM, at least 175 nM, at least 190 nM, at least 200 nM (e.g., at least 250 nM, at least 275 nM, at least 300 nM, at least 330 nM, at least 350 nM, at least 380 nM, or at least 400 nM), such as 15-450 nM, 15-300 nM, 15-350 nM, 30-390 nM, 50-350 nM, 100-350 nM, or 20-400 nM). In aspects, gDP(s) exhibit a Nectin-1 Kₒₙ of at least 1.×10⁵ M⁻¹s⁻¹, 1.25×10, M⁻¹s⁻¹, 1.5×10⁵ M⁻¹s⁻¹, 2×10⁵ M⁻¹s⁻¹, 2.5×10⁵ M⁻¹s⁻¹, 3×10⁵ M⁻¹s⁻¹, 4×10⁵ M⁻¹s⁻¹, 5×10⁵ M⁻¹s⁻¹, or even at least 7×10⁵ M⁻¹s⁻¹) (e.g., 1-10, 1.2-8.8, 1.5-7.5, 2-8, or 2-10×10⁵ M⁻¹s⁻¹- 1.25×10⁵ M⁻¹s⁻¹). In aspects, gDP(s) exhibit a Nectin-1 K_{off} of at least 0.5, 0.7, 1, 1.1, 1.25, 1.5, or 2 (e.g., 0.5-3, 0.5-2.5, 0.7-3.5, 0.7-2.8, 1-4, 1-3, or 1-25)×10⁻² s⁻¹, 1.17×10⁻² s⁻¹. In aspects, gDPs exhibit at least 1.5×, at least 2×, at least 2.5×, or at least 3× enhanced K_{d}, K_{off}, or Kₒₙ values as compared to WT gD(s), such as HSV-1 gD, HSV-2 gD, or PRV gD. Methods for assessing such values and relevant modifications of PRV gD that can be adapted to such AOTI are provided in Li A et al. PLoS Pathog. 2017; 13(5):e1006314. doi:10.1371/journal.ppat.1006314. Other modifications to gDS(s), methods for evaluating such modifications, and related compositions/methods adaptable to AOTI are described in Milne R S et al J Virol. 2003; 77(16):8962-8972. doi:10.1128/jvi.77.16.8962-8972.2003; Taylor J M et al. Cell Host Microbe. 2007; 2(1):19-28. doi:10.1016/j.chom.2007.06.005; Karasneh G A et al. Virol J. 2011; 8:481. doi:10.1186/1743-422X-8-481; and U.S. Pat. No. 5,814,486; and Di Giovine P et al. PLoS Pathog. 2011; 7(9):e1002277. doi:10.1371/journal.ppat.1002277.

[1201] In AOTI, gDP(s) comprise N1BD(s), HVEMBD(s), or CT, which exhibit suitable, comparable, or improved affinity characteristics (Kd, K_{off}, or Kₒₙ values) for N1s, HVEMs, or CT, of ≥2 species (e.g., swine N1 and human N1) as compared SMOA of the gDs of a-HVs that typically infect SMOA of such TRs. E.g., in aspects, gDPs of CEPs exhibit better affinity for human N1, swine N1, or both, as compared to HSV-1 gD, HSV-2 gD, PRV gD, or a combination thereof. In aspects, gDP(s) exhibit affinity characteristics that are suitable, comparable, or improved with respect to at least two or more types of N1s of different TR species as compared to the gDs of a-HVs that typically infect such TRs. E.g., gDP(s) can exhibit at least suitable or at least comparable binding to swine N1 & human N1 WRT to HSV-1 gD & PRV gD, respectively.

### 3) Nectin-2 RBD

[1202] In AOTI, gDP(s) comprise a Nectin-2 (N2) RBD (N2RBD). In aspects, gDP(s) comprise a WT N2RBD. In AOTI, gDP(s) comprise a variant of a non-N2-binding gD (e.g., a variant of HSV-1 gD) that is modified to be able to at least adequately bind N2. E.g., in aspects, gDP(s) comprise a gDS comprising generally all or most of the C-terminal portion of the HSV-1 gD HVEMBD (but not necessarily enough to comparably or adequately bind HVEM), the overlapping domain, and the N1BD but that include a substitution at position L50, L53, Q52, or combinations in the overlapping domain (e.g., Q52R, Q52P, or Q52A; L50P; or L53A). In AOTI, gDP(s) comprising a N2BD comprise an AARS RVRHRSIOI/SVSHSOCE to AAs 32-57 of HSV-1 gD or HSV-2 gD.

[1203] In aspects, such gDP(s) adequately, comparably, or improvingly bind both N2 and N1, but not HVEM (e.g., a Q52 variant); N2 and HVEM; N1, N2, and HVEM (e.g., a L53 variant); or only N2. In aspects, such gDP(s) adequately, comparably, or improvingly bind 30SH. In aspects, gDP(s) that bind N2 do not bind 30SHS. In aspects, gDP(s) comprising a N2BD also suitably or at least comparably bind 30SHS. As DEH, in aspects variants gDD(s), such as N1BD, N2BD, HVEMBD, or combinations that comprise gDSV(s) exhibit structural similarity to corresponding/counterpart gDD(s). E.g., a substitution at L50 comprises a geometrically constrained AA, such as a Pro, versus a more flexible AA, such as a Gly or Ala, which may be required to maintain sufficient structure of an N2BD to permit at least suitable N2 binding. In aspects, gDP(s) comprise an N2BD that binds to N2 PPTs of two or more species (e.g., mice and humans). Aspects of N2BDs, including variants, that can be adapted to such AOTIs are described in Connoly et al., 2003, supra and Landsburg D J et al. J Virol. 2003; 77(14):8127-8140. doi:10.1128/jvi.77.14.8127-8140.2003.

[1204] In aspects, OSMGAOA gDP(s) of CEPs lack any N2BD that DOS (1) enhance immune system NKC downregulation/evasion (e.g., decrease NKC degranulation, lysis, or both of DCA-cells), (2) impair DNAM-1 binding, or (3) degrade endogenous N2. Effects of gDP(s) on such functions in NKCs are described in, e.g., Grauwet K et al., PNAS 2014, 111 (45) 16118-16123; DOI: 10.1073/pnas.1409485111. In aspects, OSMGAOA gDP(s) lack WT N2BD(s). In aspects, OSMGAOA gDP(s) lack any N2BD(s).

### 4) Other gD RBDs/Receptor Binding Characteristics

[1205] In aspects, gDP(s) comprise RBD(s) that DOS bind to gDR(s) besides N1, N2, and HVEM. In aspects, such gDR(s) comprise 30SHS, a MHC gDR, or a nectin family gDR other than N1 or N2. In aspects, gDP(s) bind two or more of such alternative gDR(s). In aspects, such gDP(s) also bind one, two, or all of N1, N2, and HVEM. In aspects, such alternative gDR-binding gDP(s) bind less than all, only one, or none of N1, N2, and HVEM.

[1206] In aspects, gDP(s) bind 30SHS. In aspects, gdP(s) bind 30SHS suitably, comparably, or better than HSV-1 gD. In aspects, gDP(s) bind both 30SHS and N1. In aspects, gDP(s) bind N1, but not 30SHS. In aspects, gDP(s) bind 30SHS and comprise a gDRBD for the gDR that is RVRHRSIOI/SVSHSOCE to HSV-1 gD AAs 26-57. In aspects, gDP(s) that bind 30SHS comprise a gDS that is RVRHRSIOI/SVSHSOCE to HSV-1 gD AAs 26-285, 26-340, or 26-265. In aspects, such a gDS retains AAs corresponding to at least half MGAOA of K26, R60, R61, R155, K147, and K215 of HSV-1 gD. In aspects, gDP(s) bind 30SHS with DOS greater affinity characteristics than HSV-1 gD. In aspects, such gDP(s) comprise substitutions at two or three of AAs corresponding to AAs D240, R247, and F248 of HSV-1 gD. Aspects of gD interactions with 30SHS adaptable to AOTI are described in Yoon M et al. J Virol. 2003; 77(17):9221-9231. doi:10.1128/jvi.77.17.9221-9231.2003.

[1207] In aspects, a gDP exhibits reduced binding of 30SHS and comprises substitutions or deletions at 1+ AAs corresponding to HSV-1 gD AAs L50, L53, Q52, or combinations, which result in such reduced 30SHS binding.

[1208] In aspects, gDP(s) exhibit a K_{d} for 30SHS of less than about 1×10⁻⁶ M, such as less than about. 1×10⁻⁷ M or less than about 1×10⁻⁸ M. In aspects, gDP(s) exhibit a Kd for 30SHS of about 0.5-9.5×10⁻⁶ M. In aspects, gDP(s) exhibit a K_{d} for 30SHS that is at least about 1×10⁻⁵ M, such as at least 5×10⁻⁵ M or at least 1×10⁻⁴M.

### d. Ectodomain Core AARSs

[1209] In aspects, gDP(s) comprise a gDD that corresponds to MGAOA of a WT gD core domain. In aspects, a core domain exhibits RBD functionality, e.g., is a N1BD or N2BD. In aspects, gDP(s) comprise a core domain (gDCD) that comprise a portion that DOS enhances the functioning of RBD(s). In still other aspects, gDCD(s) primary function comprises or is to maintain the spatial relationship of other domains (e.g., an HVEMBD and a partial or total PFD).

[1210] Typically, gDCDs comprise an immunoglobulin (Ig)-like V-fold structure (e.g., in a sequence corresponding to HSV-1 gD AAs ˜80-210) (an “IgV domain” or IgVD). Typically gDCDs also comprise an N-terminal flanking domain (CDNTFD) (corresponding to HSV-1 gD AAs ˜59-79 or a FV, FF, or homolog thereof); C-terminal flanking domain (CDCTFD) (corresponding to HSV-1 gD AAs ˜211-280 or a FV, FF, or homolog thereof); or both such flanking domains. Such structures are common to a-HV gDs. E.g., PRV gD exhibits such a structure, as does HSV-1 gD and HSV-2 gD.

[1211] In aspects, gDCD(s), such as variants of a gDCD, have structural elements or a local or global structure that is similar to WT gDCD(s). In aspects the gDCD comprises MGASAOA of the six cysteine residues that form three cysteine bonds in many WT gDs, including HSV gDs (e.g., cys residues corresponding to HSV-1 gD AAs and disulfide bonds cys91: cys214, cys131 cys227, and cys143: cys152). In aspects, the position of each such corresponding cys residue in a gDD differs by less than about 20 residues, 15 residues, 10 residues, 8 residues, or 5 residues (e.g., 0-3 residues, 0-5 AAs, 0-7 residues, 0-10 residues, 0-12 AAs, 0-16 AAs, or 0-25 residues) WRT the corresponding position of such cys residues in a related WT gD when aligned.

[1212] In aspects, the IgVD comprises a nine-stranded central β-barrel structure. In aspects, the IgVD comprises a kinked, e.g., middle-kinked C” strand, in aspects leading to two strand halves connected with a distorted loop. In aspects, the gDCD contains two α-helices (α1 and α1′), located between strands C” and D or between the BC and the C″D strands of the gDCD. In aspects, a CDCTFD comprises an additional a2′ helix. In aspects, a CDCTFD lacks any additional alpha helix.

[1213] In AOTI, a gDD variant sequence comprising a gDCD and optionally related N-terminal or C-terminal extensions will exhibit or be predicted to comprise an IgV domain through empirical structural analysis (e.g., crystallography methods), computer-aided sequence analysis, or both. In aspects, gDV(s) differ from WT gDS(s) when structurally aligned by r.m.s. deviations of between ˜0.1 and 0.9 (e.g., 0.3-0.9), 0.1 and 0.75, or 0.1-0.5 Å in SMGASAOA of the compared gDD(s). Empirical determination and characterization of gDDs is described in e.g., Carfi A et al. Mol Cell 8: 169-179; Guangwen Lu et al, Journal of Virology October 2014, 88 (23) 13678-13688; DOI: 10.1128/JVI.01906-14; Krummenacher C et al (2005). EMBO J 24: 4144-4153; and other references DEH. Additional relevant methods also are DEH.

[1214] In aspects, gDP(s) comprise a gDCD-like sequence that when analyzed by computational sequence structure analysis, such as by PFAM/Interpro Scan analysis, is identified as being associated with an immunoglobulin-like domain superfamily sequence (e.g., InterPro entry IPR36179) with an E-value that indicates the structure is likely present, very likely present, highly likely present, or almost certainly present in the variant. In aspects, gDP(s) comprise a variant gDCD that is identified as exhibiting a Herpesvirus glycoprotein D/GG/GX domain family (see http://www.ebi.ac.uk/interpro/entry/InterPro/IPR002896/) or (https://www.ncbi.nlm.nih.gov/Structure/cdd/cddsrv.cgi?uid=pfam01537) using a tool trained to identify the presence of this domain in a sequence, such as the NCBI Conserved Domain Database (https://www.ncbi.nlm.nih.gov/Structure/cdd/wrpsb.cgi) (“CDD”), Interpro Scan/PFAM, Motif Scan, or the EMBL Xfam sequence search tool (http://pfam.xfam.org/search/sequence). In AOTI, the variant will exhibit an E-value, bit score, or both, which indicates that the presence of such a domain in the variant is likely, very likely, highly likely, or almost certain. For example, an E-value≥10e−100 will typically indicate near certainty of the relationship; 10e−30<E-value<10e−100 indicates the relationship is highly likely; 10e−10<E-value<10e−30 indicates that the relationship is very likely; and at 10e−6<E-value<10e−10 the relationship can be considered likely. A portion of HSV-1 gD (residues 82-206), for example, exhibits an E-value of 1.72 e−45 with respect to its relationship to pfam01537 and HSV-2 exhibits an E-value of 8.0e−39 with respect to its relationship to pfam01537. Suitable variants in one aspect are characterized as variants that when analyzed are at least likely, very likely, or at least highly likely to contain a version of this domain structure.

[1215] In aspects, a variant gDCD comprises less than 5, less than 4, less than 3, or 1-2 insertions in the IgVD or overall gDCD. In aspects, a variant gDCD comprises no insertions WRT a WT IgVD or a WT gDCD. In aspects, SMGASAOA of any insertion(s) in a variant gDCD in the IgVd are 20 AAs or less, 15 AAs or less, 12 AAs or less, 10 AAs or less, 7 AAs or less, or 5AAs or less in size (e.g., 1-4 AAs or 1-3 AAs).

[1216] In aspects, gDP(s) lack any strand(s) that diminish binding to OSMOA gDR(s). E.g., in aspects gDP(s) comprise gDCDs RVRHROSI to BHV-1 gD, but which lack the nectin-1-binding diminishing G-strand/a2-helix interloop of BHV-1 gD. In aspects, such a gDP comprises a substitution of mature BHV-1 gD R188 (e.g., with Gly). In aspects, such gDP(s) exhibit at least 2×, at least 3×, or at least 4× affinity for N1. Such approaches are exemplified by Yue D, et al. Science Advances. 2020: Vol. 6, no. 20, DOI: 10.1126/sciadv.aba5147.

[1217] In aspects, as DEH, a CDCTFD or a gDS corresponding to a gDS in a WT gD positioned downstream of the CDCTFD comprises 1+ insertion(s). In aspects a CDCTFD or downstream gDS comprises a single insertion. In aspects, the length of such insertion(s) total 15-350 AAs, 20-300 AAs, 25-250 AAs, 30-180 AAs, 30-150 AAs, 40-240 AAs, 40-200 AAs, 50-250 AAs, or 50-200 AAs. In aspects, MGASAOA of such insertion(s) comprise Ag(s). In aspects, such Ag(s) are associated with PTPS(s), FL(s), MSL(s), SCS(s), or combinations. In aspects, AARSs inserted in the IgVD or near the IgVD (e.g., within 25 AAs, 15AAs, or 10 AAs of either or both ends) are mostly, generally, or substantially only composed of rigid residues. In aspects, insertion of residues in the C-terminal portion of a CDCTFD or downstream thereof (e.g., in a PFD or downstream of a PFD) are mostly, generally, or substantially composed of flexible residues.

### e. Profusion & Secretion-Promoting Domains & Related Subdomains

[1218] As DEH, in aspects gDP(s) comprise a gD profusion domain (e.g., a domain that corresponds to a PFD of a WT a-HV, such as PRV or a HSV). In HSV-1 gD, the WT PFD is located in/about AAs 286-330. SFE Cocchi F et al. PNAS. 2004; 101(19):7445-7450. doi:10.1073/pnas.0401883101.

[1219] In AOTI, gDP(s) comprise a flexible hinge domain, which corresponds to the AARS upstream of the PFD and the N-terminal portion of the PFD in HSV-1 gD (AAs 281-292). In aspects, a portion of the PFD associates an overlapping domain, if present in the gDP, in the gDR-unbound state (similar to how AAs 293-331 of HSV-1 gD turn and partially run anti-parallel (e.g., at about AAs 311/315-331) to HSV-1 gD AAs 48-57/58). In AOTI, such gDP(s) comprise a functioning PFD. In AOTI, gDP(s) lack a functioning PFD.

[1220] In aspects, the PFD in a gDP is proline-rich, comprising at least 5%, at least 10%, at least 15%, or at least 20% Pro residue content. In aspects, residues corresponding to most or all of HSV-1 gD P291, P292, and W319 are maintained in a functioning PFD. In aspects, AAs corresponding to MGASAOA of HSV-1 gD AAs Phe248, Asn252, Thr255, Val256, Tyr259, Ile315, Asn318, and His320 are maintained.

[1221] In aspects, gDP(s) lack the C-terminal portion of a PFD. E.g., in aspects, no sequence corresponding to AAs 300-340, e.g., 300-335, 302-335, 302-340, 305-335, or 305-340 are contained in the sequence. In aspects in which gDP(s) lack TMD(s) and cytosolic domains such gDP(s) lack any gDS(s) that corresponding to any such downstream gDS(s).

[1222] In aspects, gDP(s) comprise an AA corresponding to W319 that is in a similar position in the gDP with respect to a residue corresponding to F154 of an N1BD, such residues DOS promoting N1 binding. In aspects, gDPs comprise a sequence according to the formula P-X₁-X₂-W-Xₚ-P-S-X₃-X₄-X_{Ω}-X₅-X₆-P-X₇-X₈-X₉-P-A-T-P (SEQ ID NO:720), wherein X₁ is any residue, in aspects P; X₂ is N or G; Xₚ is 0-2 of any residues, in aspects H-I; X₃ is I or L; X₄ is Q or E; X_{Ω} is any 2 residues; X₅ is A or T; X₆ is any residue, in aspects T; X₇ is any residue, in aspects Y or P; Xs is any residue, in aspects H or P; and X₉ is any residue, in aspects P or according to the formula P-Xα-A-P-X_{β}-X₂-P-X₃-X₄-W-X₅-X₆-P-X₇-X-P (SEQ ID NO:721), wherein Xa is any 4 AAs, X_{β} is any 2-3 AAs, X₂ is I or V; X₃ is any residue, in some aspects P; X₄ is N or G; X₅ is any residue, in aspects H or P; X₆ is any AA, in aspects I or Q; X₇ is S or A; and X is 9 AAs comprising 1-4 P AAs. In AOTI such a gD comprises GAOA of SEQ ID NO:722.

[1223] In aspects, gDP(s) lack a PFD. In aspects, such gDP(s) exhibit enhanced gDR binding for one or more gDR(s) (e.g., N1, HVEM, or both). In aspects, such gDP(s) exhibit at least 5×, at least 10×, at least 15×, at least 20×, at least 35×, at least 50×, or at least 80× gDR affinity than corresponding gDP(s) comprising a PFD.

[1224] In AOTI, gDP(s) comprise a PFD but lack any RBD(s). In AOTI, gDP(s) comprise a PFD but lack any IgVD or any gDCD. In AOTI, an immature gDP comprises a gDSS and a PFD. In aspects, such a gDP comprises 1, 2, or 2+ ETSs, e.g., a DEC-205-binding ETS (e.g., a keratin DEC-205 binding AARS).

[1225] Additional aspects relating to PFD modifications, deletions, etc., that can be adapted to such AOTI are described in Li A et al. PLoS Pathog. 2017; 13(5):e1006314. doi:10.1371/journal.ppat.1006314.

### f. Secretion-Promotion gDD (SPD) & GPI Anchoring gDD (GPIAD)

[1226] Portions of WT gDCDs can exhibit additional functional characteristics and gDS(s) corresponding to such functional domains can be included in gDCDs or can be separately incorporated into gDP(s). In aspects, gDP(s) comprise a functional glycosylphosphotidylinositol (GPI) anchoring domain (GPIAD). In aspects, gDP(s) that comprise a GPIAD DOS associate with cell surface membranes, even when such gDP(s) lack TMD(s). In aspects, such gDP(s) are DOS more processed by ERs in COEs, e.g. in GPI-deficient cells. In aspects, such a gDS corresponds to residues 234-337 of HSV-1 gD (described in Beghdadi-Rais et al., J. Cell Sci. 105:831-40. 1993) (e.g., a gDP can comprise a variant that is RVRHROSI/SVSHSOCE to such sequence). In aspects, gDP(s) comprise a sequence corresponding to HSV-1 gD AAs 254-294 (in aspects all of 234-254), which can act as a secretion promoting domain (SPD) in suitable gDP(s) that DOS enhances secretion of the gDP from COE (e.g., gDP(s) can comprise a gDS that is RVRHROSI/SVSHSOCE to such a sequence). In aspects, glycosylation site(s) are removed from such a gDS resulting in further DOS enhanced secretion. Additional aspects relating to such gDS(s) that can be adapted to AOTI are described in US20030236396.

### g. gD TMD & Cytosolic Domain Characteristics

[1227] As DEH, in aspects gDP(s) comprise TMDs, cytoplasmic domain (a.k.a. an intravirion/topological domain), or both. In aspects, gDP(s) lack any TMD, topological domain, or both. E.g., in gDP(s) that are FFs or FVs of HSV-1 gD, such gDP(s) can lack any gDS corresponding to HSV-1 gD AAs 331-394, 335-394, 340-394, or 344-394. In MDV gD FFs or FVs such a gDP can lack any gDS corresponding to MDV/SuAHV-1 gD AAs 358-378 or any residue downstream of residue 358. In PRV gD FFs or FVs, such a gDP can lack any gDS corresponding to PRV gD AAs 358-378 or any residue downstream of AA 358. Such gDP(s) lacking a TMD can be described as “soluble” gD(s). Additional examples of such gDP(s) and related principles/methods described in, e.g., Fusco D et al. PNAS. 2005; 102(26):9323-9328. doi:10.1073/pnas.0503907102.

### 3. EAT-2 PPTs

[1228] In aspects, CEPs comprise Ewing's sarcoma-associated transcript 2 (“EAT-2”) PPTs. In aspects, EAT-2 PPTs are FPs. In aspects, EAT-2 PPTs are NFPs. In aspects, EAT-2 PPTS comprise ELWT EAT-2 AARSs. In aspects, EAT-2 PPTS comprise a FF of a EL WT PPT. In aspects, EAT-2 PPTs comprise a chimeric EAT-2 PPT. In aspects, EAT-2 PPTs comprise FVs of EAT-2 PPTs. CEPs can comprise any suitable number of EAT-2 PPTs of any suitable type.

[1229] In AOTI, EAT-2 PPT(s) DOS induce IR(s), CE(s), or both in TRs. In aspects, EAT-2 PPTs of CEPs DOS link SLAM family ICR(s) to phospholipase Cy, calcium fluxes, Erk kinase, or combinations. In aspects, an EAT-2-containing CEP accelerates NKC-mediated IR(s), B cell mediated IR(s), NKT cell mediated IR(s), DC-mediated IR(s), T cell-mediate IR(s), macrophage IR(s), or CT.

[1230] In aspects, EAT-2 PPT CEPs DOS induce polarization and exocytosis of cytotoxic granules from IC(s), such as NKCs, CD8 T-cells, or both. In aspects, EAT-2 PPT CEPs DOS induce DC maturation, monocyte phagocytosis of DCA-associated cells, or both. In aspects, EAT-2 PPT CEPs DOS reduce CRACC/SLAMF7 IR inhibition.

[1231] In aspects, EAT-2 PPTs in CEPs DOS enhance one or more aspects of immunological memory, such as enhanced memory T cell population or enhanced memory T cell IR(s). In aspects, EAT-2 PPT CEPs DOS break IC tolerance characteristic(s).

[1232] In aspects, EAT-2 PPT CEPs DOS modulate Th1-biasing proinflammatory cytokine and chemokine responses in TRs.

[1233] In aspects such IR(s) comprise DOS increases in IC expression of IL-1α, IL-2, G-CSF, IL-5, IL-12p70, GM-CSF, IL-1β, TNFα, IL-12p40, IL-6, IL-9, RANTES, MCP-1, MIP-1α, MIP-1β, IFN-γ, or combinations. In aspects, EAT-2 CEPs enhance IL-1β production 2×, 3×, 4×, or more; enhance IL-6 production 3×, 4×, 5×, or more; enhance TNFa 2×, 3×, 5× or more; enhance G-CSF production 3×, 4×, 5×, or more; enhance IL-17 production 33%+, 50%+, or 75%+; enhance IL-10 production 1×, 1.5×, 2×, or more; or exhibit combinations thereof.

[1234] In aspects, CEPs comprising EAT-2 PPT(s) comprise pathogen DCA-associated Ag(s), such as VAg(s). In aspects, EAT-2 CEPs comprise CAg(s) and the CEPs DOS inhibit tumor growth in TRs, reduce tumor size in TRs, or increase tumor necrotic tissue in TRs.

[1235] Aspects of WT functions of EAT-2 in such respects are described in, e.g., Aldhamen Y A et al. Vaccine. 2016; 34(27):3109-3118. doi:10.1016/j.vaccine.2016.04.068; Thompson A D et al. Oncogene. 1996 December; 13(12):2649-2658; Aldhamen Y A et al. J Immunol. 2012; 189(3):1349-1359. doi:10.4049/jimmunol.1200736; Perez-Quintero L A et al. J Exp Med. 2014; 211(4):727-742. doi:10.1084/jem.20132038; Aldhamen Y A et al. J Immunol. 2011; 186(2):722-732. doi:10.4049/jimmunol.1002105; Aldhamen Y A et al. Cancer Gene Ther. 2013; 20(10):564-575. doi:10.1038/cgt.2013.53; Aldhamen Y A et al. Int Immunol. 2014; 26(5):291-303. doi:10.1093/intimm/dxt061; and WO2011133870 (aspects of the '870 WO application relating to other SLAM Family ICR STAPs, such as SAP PPTs, also can be adapted to other AOTI DEH).

[1236] In aspects, an EAT-2 PPT is a human EAT-2 (SEQ ID NO: ), a murine EAT-2 PPT (SEQ ID NO: ), or an FF or FV of either thereof. Additional EAT-2 encoding sequences and AARSs are known (see, GenBank Access Nos./NCBI protein database entries NM_012009.4, NM_012009, 148747582, NM_012009.5, 54792745, NM_053282.4 and Uniprot Entries 014796 and 035324). In aspects, an EAT-2 PPT is a canine EAT-2 or a FF or FV (SFE https://www.ncbi.nlm.nih.gov/protein/545556824). In aspects, an EAT-2 PPT is a chicken EAT-2 PPT or a FF or FV thereof (SFE https://www.ncbi.nlm.nih.gov/protein/491222610 and GenBank NM_001278073.1). In aspects, an EAT-2 PPT is a bovine EAT-2 PPT (SFE https://www.ncbi.nlm.nih.gov/protein/300798404 or an FF or FV thereof (see also GenBank NM_001193162.1).

[1237] In aspects, an EAT-2 PPT, such as an EAT-2 variant, which comprises an AARS comprising generally all, substantially all, or all of a sequence according to the formula M-D-L-P-Y-Y-H-G-Xα-L-T-K-X1-X2-C-E-X3-L-L-L-K-Xα-G-V-D-G-N-F-L-X4-R-D-S-E-S-X5-P-G-X6-L-C-L-zC-V-S-F—K-X7-X8-V—Y-X9-Y—R-I-F-R-E-K-H-G-Y—Y-R-I-Q-T-Xα-Xa-Xα-X10-P-X11-Xα-X12-F—P-X13-L-X14-E-L-X15-S—K-X16-Xα-K—P-X17-Q-G-X18-V—V-H-L-Xα-X19-P-I-Xα-R-X20-X21-Xα-Xa-Xα-R-Xα-R-G-X22-X23-L-E-L-X24-X25-X26-Xα-N-X27-X28-Xα-X29-Y-V-D-V-L-P (SEQ ID NO: 723), wherein Xa represents any AA, X1 is Q or R; X2 is D or E; X3 is T or A; X4 is L or I; X5 is I or V; X6 is V or A; X7 is N or K; X8 is I or L; X9 is T or S; X10 is S or T; X11 is K or R; X12 is V or I; X13 is S or N; X14 is K or Q; X15 is I or V; X16 is F or Y; X17 is N or G; X18 is M or L; X19 is K or N; X20 is T or N; X21 is S or N; X22 is L or M; X23 is K or E; X24 is E or N; X25 is T or V; X26 is F or Y; X27 is S or T; X28 is N or D; and X29 is D or E and which suitably, comparably, or improvingly exhibits any one or more EAT-2 function(s), such as the functions of EAT-2 PPTs described above.

[1238] In aspects, CEPs comprising EAT-2 PPT(s) also comprise a SLAMF CPCR PPT, e.g., a SLAMF5 CPCR PPT or a SLAMF7 CPCR PPT. In methods, a SLAMF CPCR is expressed in AAW delivery of CEPESC(s) including EAT-2-ES(s). In aspects, CEPs comprise both EAT-2 PPT(s) and SAP PPT(s). In aspects, CEPs comprise EAT-2 PPT(s), SAP PPT(s), and SLAMF6 CPCR PPT(s), which DOS enhance NKC activation. In aspects, CEPs comprise activating peptidic ligand(s) for a SLAMF receptor in addition to EAT-2 PPTs.

[1239] In aspects, EAT-2 AARS(s) are included in a gDFP. In aspects, EAT-2 AARS(s) are included in gDAgFP(s). In aspects, EAT-2 AARS(s) are expressed from different NAM(s) than the NAM encoding any gDP in the CEP.

### 4. C. Vectors

[1240] The constructs of the invention are typically incorporated into a larger construct that includes nucleotide sequences that (1) allow for stable replication of the combined construct, (2) aids in transmission of the construct to a host, (3) aids in the expression of a coding sequence or an expression cassette, or (4) a combination of any or all thereof. Such larger constructs are known in the art as “vectors” and where they are expressible are called “expression vectors.” In general, a “vector” is a composition of matter which comprises one or more nucleotide sequences and which can be used to deliver the nucleotide sequences to the interior of a cell. Numerous vectors are known in the art including, but not limited to, linear polynucleotides, polynucleotides associated with ionic or amphiphilic compounds, plasmids, and viruses.

[1241] In general, any method described herein as relating to the delivery of nucleic acid molecules or nucleotide sequences can be performed by delivery of a suitable vector and any method or composition described herein as comprising a vector can comprise any suitable type of vector, except where the disclosure is specifically limited (e.g., in certain aspects of the invention the use of nucleic acid vectors, such as DNA plasmids, is specifically contemplated). Additionally, unless otherwise indicated herein any description of a “vector” can be construed as including or being an expression vector.

[1242] To illustrate, a construct, such as those described above, encoding, e.g., a gD:antigen sequence, can be combined with any suitable vector-forming nucleic acid construct (which, in the case of DNA vectors, may be described as a “backbone”), which vector construct can include any suitable collection of other nucleotide sequences (e.g., an origin of replication, a sequence encoding a selectable marker, one or more suitable sites for construct insertion, such as one or more multiple cloning sites, or a combination of any or all thereof), and the resulting expression vector can be a component of a composition of the invention or used in the methods of the invention. An “origin of replication” or “replication origin” is a sequence at which replication is initiated. Origins of replication are found in prokaryotes and eukaryotes and are required for the propagation of the plasmid episomally (i.e., extragenomically) in host cells.

[1243] Skilled practitioners reading this disclosure will understand that is overlap between what can be classified as a “vector” and what can be classified as an expression cassette, particularly in the case of non-viral DNA vectors (sometimes referred to as “DNA vectors” or “DNA vaccines”), such as plasmid vectors (sometimes “plasmids”).

[1244] Expression vectors (sometimes also called “delivery vectors”), other vectors, and methods for their construction are known to those skilled in the art (SFE Ausubel et al., cited herein). Examples of suitable delivery/expression vectors include, e.g., a bacterial delivery vector, a DNA vaccine delivery vector, an RNA vaccine deliver vector, a virus delivery vector, a virus-like particle, or a composition that comprises such a vector in combination with other delivery-enhancing materials, such as a liposomal delivery vector, a transformed cell (e.g., a eukaryotic cell such as a producer cell or a DC or an attenuated bacteria) comprising a number of nucleic acid vectors, or a nucleic acid-loaded nanoparticle. In one embodiment, a delivery vector differs from a plasmid or phage vector. In aspects, a delivery vector and a plasmid or phage vector of this disclosure are the same.

[1245] In general, a vector in the context of this disclosure can comprise any suitable set of components. Examples of components that can be suitable contained in vectors of the invention include elements such as promoters and enhancers, typically where such elements are not associated with the coding sequence already in an expression cassette, and, thus, form an expression cassette once the coding sequence(s) are inserted into the vector. The properties associated with promoters/enhancers are discussed more thoroughly above; examples of which include tissue/cell specificity in some cases, detectably or significantly improved levels of expression of associated coding sequences, and detectably or significantly prolonged periods or frequency of expression of associated coding sequences. A vector also or alternatively can similarly comprise regulatory elements such as a polyA signal sequence, which typically will be positioned 3′ of any inserted coding sequence(s). The properties of polyA sequences and similar elements also are discussed above. Depending on the vector, inserted sequences comprising coding sequences, and host utilized, if relevant, any of a number of suitable transcription and translation control elements, including constitutive and inducible promoters, transcription enhancer elements, transcription terminators, etc. may be incorporated into an expression vector (see e.g., Bitter et al. (1987) Methods in Enzymology, 153:516-544, which exemplifies relevant PMCs.

[1246] The vector backbone will typically include sequences that sustain expression activity, such as transcription factor binding sites. Minimally sized vectors, such as “minicircles,” which are known in the art, can be associated with relatively lower immunogenicity than larger vectors. In AOTI, a vector of a composition or method of the invention may be a self-replicating vector, which is capable of being maintained in dividing mammalian cells. Examples of self-replicating vectors are plasmids including latent on (oriP) elements and EBV nuclear antigen 1 (EBNA1) gene derived from the Epstein Bar Virus (EBV). Such vectors are described in, e.g., Längle-Rouault F et al. J Virol. 1998; 72(7):6181-6185. In aspects, a vector of a composition or method of the invention may be a self-partitioning vector. Self-partitioning vectors include self-partitioning plasmids containing scaffold/matrix attachment regions (S/MARs), which optionally can include a suitable replication origin, e.g., a SV40 virus origin of replication (such vectors are described in, e.g., Piechaczek C et al. Nucleic Acids Res. 1999; 27(2):426-428. doi:10.1093/nar/27.2.426).

[1247] Vectors described herein usually do not integrate with the host genome. Non-genome-integrating vectors are an AOTI and this characteristic can be applied to any of the various vectors and constructs described herein.

### i. Non-Viral Nucleic Acid Vectors

[1248] In AOTI, the compositions of the invention comprise, and methods of the invention comprise, the use of non-viral nucleic acid vectors. Non-viral nucleic acid vectors are vectors (or “nucleic acid vectors”) in this disclosure means vectors that (a) do not comprise more than about 65%, in some cases more than about 75%, and in still other cases more than about 85% of the genome of any single virus, (b) do not result in the expression of complete viral particles capable of invading host cells, or (c) both (a) and (b). Nucleic acid vectors can be RNA constructs, such as RNA vaccines described above, or DNA vectors, such as DNA plasmids or linear expression elements.

[1249] DNA constructs useful in the present compositions can be “naked” DNA vectors (as described in, e.g., Restifo et al. Gene Therapy 2000; 7:89-92). Naked nucleic acid vectors are compositions of nucleic acids that are free of any association with viral capsid proteins in stable composition or when delivered in a method. In AOTI, nucleic acid vectors used in compositions or methods of the invention are not associated with any polypeptides, in particular not with polypeptides of viral origin, when in stable composition or administered to a subject (however, such constructs may encode one or more viral polypeptides as antigens). NAVs also can be associated with various TFAs, as DFEH.

[1250] A nucleic acid vector can be in the form of a circular plasmid or a linear nucleic acid (e.g., a DNA linear expression element or a mRNA). In a typical facet of the invention, a DNA construct is in the form of a circular DNA plasmid. The term “plasmid” refers to any suitable circular double stranded DNA loop into which additional DNA segments can be ligated. A conventional plasmid is a circular DNA vector that includes at least one expression cassette and a separate plasmid “backbone.” As described above, an expression cassette is a nucleic acid construct capable of directing the expression of a RNA transcript coding for a polypeptide of interest. An expression cassette generally includes a promoter recognized by the host organism and that is operably linked to the coding sequence, i.e. the DNA sequence encoding for the RNA transcript that is translated to produce the polypeptide of interest. As described in detail above, an expression cassette may also contain, among other things, sequences necessary for the termination of transcription and for stabilizing the resulting mRNA, such as regions transcribed as polyadenylated fragments in the untranslated portion of the mRNA encoding for the polypeptide of interest. Typically, a plasmid backbone is the DNA sequence located between the two ends of an (or each) expression cassette. As noted, a backbone can comprise one or more functional sequences, such as an origin of replication and a selectable marker. Such selectable markers may include, for example, an antibiotic resistance gene, examples of which are discussed elsewhere in this disclosure. As many plasmids were originally used for replication in prokaryotes, such as bacteria, plasmids have historically included a number of bacterial sequences. Plasmid backbones also can be engineered to include restriction sites, such as polylinkers.

[1251] Numerous plasmid backbones are available in the art, including pVax and pcDNA3 plasmids (Thermo Fischer, Scientific, Waltham, Mass., USA). Nucleic acid vectors are reviewed in, e.g., Rodriguez EG. Nonviral DNA vectors for immunization and therapy: design and methods for their obtention. J Mol Med (Berl). 2004; 82(8):500-509. doi:10.1007/s00109-004-0548-x and Gómez and Oñate, “Plasmid DNA Vaccines” DOI: 10.5772/intechopen.76754 (https://www.intechopen.com/books/plasmid/plasmid-based-dna-vaccines). An example of an exemplary plasmid vector that can be incorporated in compositions of the invention and used in certain methods of the invention is provided in the Examples, below (plasmid constructs pMBF116-CMVp-Ub-CP204L-T2A-GFP-TcnR & plasmid pMBF117-CAGp-Ub-CP204L-T2A-GFP-TcnR).

[1252] Another exemplary type of nucleic acid vector that may be suitable in certain contexts are minicircle vectors (SFE US20040214329 and US20110244566). Minicircle vectors typically differ from bacterial plasmids in that they lack an origin of replication, and lack selectable markers commonly found in bacterial plasmids, e.g. β-lactamase, tet, and the like. Consequently, minicircles are small in size, allowing more efficient delivery to a cell. More importantly, minicircles are often devoid of the transgene expression silencing effect which is associated with these plasmid backbone nucleic acid sequences. DNA minicircles (MCs) devoid of the majority of the plasmid backbone are known in the art (SFE U.S. Patent Publication 2004/0214392).

[1253] A similar type of vector is know as a mini-intronic plasmid (MIP), in which the essential bacterial elements for plasmid replication and selection that are included in the plasmid backbone of conventional pDNA (i.e., the bacterial origin of replication and the selectable marker) are placed within an engineered intron within the expression cassette (SFE U.S. Patent Publication 2013/0210897). As with DNA minicircle vectors, using MIP vectors does not result in reduced expression over time of the polypeptide of interest, as seen with conventional pDNA vectors. Furthermore, using such vectors results in significantly increased expression of the polypeptide of interest, as compared to DNA minicircle vectors containing the same expression cassette. Finally, MIP vectors are relatively simple to produce (see Lu, J., Zhang, F. and Kay, M. A. (2013), A mini-intronic plasmid (MIP): a novel robust transgene expression vector in vivo and in vitro, Mol Ther 21: 954-63, which is incorporated by reference herein in its entirety). Unlike a conventional plasmid, a MIP vector does not include a plasmid backbone region separate from the expression cassette. MIPs are further described in U.S. Pat. Nos. 9,347,073, 9,827,308, and Simcfkove M, Prather K L, Prazeres D M, Monteiro G A. Towards effective non-viral gene delivery vector. Biotechnol Genet Eng Rev. 2015; 31(1-2):82-107. doi:10.1080/02648725.2016.1178011.

[1254] In some embodiments, the MIP intron is operably linked to the same promoter that mediates the expression of the polypeptide of interest by the MIP vector. Thus, the MIP intron is an integral part of the expression cassette. In such instances, the MIP intron may be located in any configuration relative to the sequence encoding for the polypeptide of interest (the “coding sequence”). In some embodiments, the MIP intron may be located upstream, or 5′, of the coding sequence, i.e. between the promoter and the initiation codon for the coding sequence. In other embodiments, the MIP intron may be located within the coding sequence, i.e. flanked by two exons of the coding sequence. In other embodiments, the MIP intron may be located downstream of the coding sequence. For example, if the coding sequence does not include a termination sequence, the MIP intron may be placed downstream of the coding sequence and upstream of an exogenous termination, e.g. a polyadenylation, sequence. In some aspects, the intron of the MIP vector comprises an expression-enhancing intron, such as those described elsewhere herein.

[1255] An MIP vector typically is substantially free of any bacterial plasmid backbone sequences other than those sequences that are included within the MIP intron. Specifically, the MIP vector is devoid of any bacterial origin of replication or selectable marker located outside of the MIP intron. Furthermore, the MIP vector is generally restricted to an extra-genic spacer length of 500 nucleotides or less. Such a vector may have no more than about 50 nt, no more than 40 nt, no more than 25 nt, no more than 10 nt, no more than 5 nt bacterial sequence derived from the plasmid backbone. In some instances, a mini-intronic plasmid vector is a vector that is substantially free of any bacterial sequences other than those comprised by the intronic cassette, i.e. the plasmid has no more than about 50 nt, no more than 40 nt, no more than 25 nt, no more than 10 nt, no more than 5 nt bacterial sequence derived from the plasmid backbone. In some instances, as when the expression cassette comprises the intronic cassette. A typically MIP vector is generally at least about 0.3 kb long, often at least about 1.0 kb long, where the vector may be as long as 5 kb or longer, in some instances 10 kb or 20 kb or longer, but in certain embodiments do not exceed this length. Any convenient method may be employed, e.g. as known in the art or described below, to determine if a vector is able to enter a cell and if CSs are able to be expressed from the vector.

[1256] Mini-intronic plasmid vectors may be prepared in any of a number of ways using standard molecular biology techniques. For example, an origin of replication and selectable marker may be cloned into the endogenous intron of a transgene of interest, e.g. a transgene comprised by an expression cassette on a cloning vector, to create an intronic cassette, and the origin of replication and selectable marker of the cloning vector removed by restriction endonuclease digestion and self-ligation. The mini-intronic plasmid vector may then be propagated in cells, and cells comprising the vector selected for using the selection marker in the intronic cassette. Alternatively, an intronic cassette comprising a polynucleotide comprising an origin of replication and a selectable marker flanked by a splice donor sequence and a splice acceptor sequence may be isolated from a vector by excision by, e.g. restriction endonuclease digestion; the intronic cassette may be purified by, e.g. gel purification; the purified intronic cassette may be inserted into the expression cassette of a vector comprising the transgene; and the origin of replication and selectable marker of the cloning vector removed by restriction endonuclease digestion and self-ligation. An MIP vector may then be propagated in cells, and cells comprising the vector selected via a selection marker in the intronic cassette.

[1257] Compositions and methods of the invention also or alternatively can incorporate a linear nucleic acid vaccine, or linear expression cassette (“LEC”) (sometimes alternatively called a “linear expression element”), which can serve as a vector in any suitable part of this disclosure directed to vectors. An LEC may be any linear DNA devoid of any phosphate backbone. An LEC may be derived from any plasmid capable of being linearized. In AOTI, LECs are incorporated or used as vectors that exhibit a low amount (less than 10%, less than 5%, or less than 2%) or no amount of sequences derived from bacteria (this principle can also apply to minicircle and other vectors of the invention). Examples of linear vector constructs are described in, e.g., Wong S, Lam P, Nafissi N, Denniss S, Slavcev R. Production of Double-stranded DNA Ministrings. J Vis Exp. 2016; (108):53177. Published 2016 Feb. 29. doi:10.3791/53177; Walters A A, Kinnear E, Shattock R J, et al. Comparative analysis of enzymatically produced novel linear DNA constructs with plasmids for use as DNA vaccines. Gene Ther. 2014; 21(7):645-652. doi:10.1038/gt.2014.37; Nafissi N, Alqawlaq S, Lee E A, Foldvari M, Spagnuolo P A, Slavcev R A. DNA ministrings: highly safe and effective gene delivery vectors. Mol Ther Nucleic Acids. 2014; 3(6):e165. Published 2014 May 27. doi:10.1038/mtna.2014.16; WO2019161059; and WO2019246544. Linear DNA constructs may be advantageous in certain situations as discussed in Cherng, J Y et al., J. Control. Release 60:343-53 (1999), & Chen, Z Y et al. Mol. Ther. 3:403-10 (2001).

[1258] Examples of known NAVs suitable for AOTI include minicircle, minivector, miniknot, MIDGE, MiLV, Ministring, and Mini-intronic plasmid vectors. NAVs can be in the form of plasmids, or other naked DNA constructs. Examples of such vectors are described in Hardee C L, et al. Genes (Basel). 2017; 8(2):65. doi:10.3390/genes8020065 and Williams JA. Vaccines (Basel). 2013; 1(3):225-249. doi:10.3390/vaccines1030225.

[1259] In view of the foregoing it will be clear that generally a variety of nucleic acid vectors can be incorporated in compositions of the invention or used in methods of the invention, including a linear expression element (as described in, e.g., Sykes and Johnston (1997) Nat Biotech 17:355-59), a compacted nucleic acid vector (as described in, e.g., U.S. Pat. No. 6,077,835 and/or International Patent Application WO 00/70087), a plasmid vector such as pBR322, pUC 19/18, or pUC 118/119, a “midge” minimal-sized nucleic acid vector (as described in, e.g., Schakowski et al. (2001) Mol Ther 3:793-800, and the nucleic acid vectors described in U.S. Pat. Nos. 5,589,466 and 5,973,972. In AOTI, the nucleic acid vector is a plasmid vector, formed of a closed circular DNA molecule. As suggested already above, a plasmid may include one or more sequences from a viral nucleic acid. However, such viral sequences normally are not sufficient to direct or allow the incorporation of the plasmid into a viral particle, and the plasmid is therefore a non-viral vector. Certain compositions of the invention can comprise a plurality of vectors, such as a plurality of nucleic acid vectors, such as a plurality of plasmid vectors.

### ii. Viral Vectors

[1260] A vector that is either composed of or encodes a viable virus capable of infecting host cells is referred to herein as a “viral vector.” There are a large number of available viral vectors suitable for use with the compositions of the instant disclosure, including those identified for human gene therapy applications (see Pfeifer and Verma, Ann. Rev. Genomics Hum. Genet. 2:177, 2001). For example, a viral vector may be selected from the following: a retrovirus, an adenovirus, an adeno-associated virus, a herpes virus, a pox virus, a human foamy virus (HFV), a lentivirus, or any other virus delivery vector known in the art. In AOTI, vectors used in compositions and methods of this disclosure can be DNA viral vectors, including, for example adenovirus-based vectors and adeno-associated virus (AAV)-based vectors; vectors derived from herpes simplex viruses (HSVs), including amplicon vectors, replication-defective HSV and attenuated HSV (Krisky et al., Gene Ther. 5: 1517, 1998). In an exemplary embodiment, a viral vector is selected from the group consisting of adenovirus vectors, adeno-associated virus (AAV) vectors (e.g., AAV type 5 and type 2), alphavirus vectors (e.g., Venezuelan equine encephalitis virus (VEE), sindbis virus (SIN), semliki forest virus (SFV), and VEE-SIN chimeras), herpes virus vectors (e.g. vectors derived from cytomegaloviruses, like rhesus cytomegalovirus (RhCMV), arena virus vectors (e.g. lymphocytic choriomeningitis virus (LCMV) vectors), measles virus vectors, and poxvirus vectors. Examples of adenoviral vectors, alphavirus replicons, herpes virus vectors, pox virus vectors, and rhabdovirus vectors, are described in, e.g., Jolly (1994) Cancer Gene Therapy 1:51; Latchman (1994) Molec. Biotechnol. 2:179; Johanning et al. (1995) Nucl. Acids Res. 23:1495; Berencsi et al. (2001) J. Infect. Dis. 183:1171; Rosenwirth et al. (2001) Vaccine February 19:1661; Kittlesen et al. (2000) J. Immunol. 164:4204; Brown et al. (2000) Gene Ther. 7:1680; Kanesa-thasan et al. (2000) Vaccine 19:483; and Sten (2000) Drug 60:249.

[1261] Viral vectors also include vectors based on RNA viruses, such as retrovirus-derived vectors, e.g., Moloney murine leukemia virus (MLV)-derived vectors, and include more complex retrovirus-derived vectors, e.g., lentivirus-derived vectors (e.g., HIV, FIV, equine infectious anemia virus, bovie immunodeficiency virus (BIV), simian immunodeficiency virus (SIV), and Maedi-Visna virus (ovine lentivirus) vectors) (SFE U.S. Pat. No. 8,119,772; Walchli et al., PLoS One 6:327930, 2011; Zhao et al., J. Immunol. 174:4415, 2005; Engels et al., Hum. Gene Ther. 14:1155, 2003; Frecha et al., Mol. Ther. 18:1748, 2010; Verhoeyen et al., Methods Mol. Biol. 506:97, 2009).

[1262] A number of adenovirus vectors have also been described. Unlike retroviruses which integrate into the host genome, adenoviruses persist extrachromosomally thus minimizing the risks associated with insertional mutagenesis (Haj-Ahmad and Graham, J. Virol. (1986) 57:267-274; Bett et al., J. Virol. (1993) 67:5911-5921; Mittereder et al., Human Gene Therapy (1994) 5:717-729; Seth et al., J. Virol. (1994) 68:933-940; Barr et al., Gene Therapy (1994) 1:51-58; Berkner, K. L. BioTechniques (1988) 6:616-629; and Rich et al., Human Gene Therapy (1993) 4:461-476). Molecular conjugate vectors, such as the adenovirus chimeric vectors described in Michael et al., J. Biol. Chem. (1993) 268:6866-6869 and Wagner et al., Proc. Natl. Acad. Sci. USA (1992) 89:6099-6103, can also be used for delivery of constructs of the invention. Adenoviral vectors can be derived from any suitable species and serotype of adenoviral vector, such as the primate adenoviral vectors (e.g., Ad68) described in the Wistar Art, and the widely used/studied human Ad2 and Ad5 vectors, as described for example in Curiel, D T and Douglas J T (2002) Adenoviral Vectors for Gene Therapy (Elsevier Inc.). An adenoviral vector can, e.g., be or can be derived from a human adenovirus vector, a simian adenovirus vector, a group B adenovirus vector, a group C adenovirus vector, a group E adenovirus vector, an adenovirus 6 vector, a PanAd3 vector, an adenovirus C3 vector, a ChAdY25 vector, an AdC68 vector and an Ad5 vector. Methods of modifying, packaging, and purifying any of these adenoviral vectors and other recombinant viral vectors are well known in the art, SFE Viral Vectors for Gene Therapy: Methods and Protocols. (NewJersey: Humana Press Inc.), the full disclosures of which are incorporated herein by reference.

[1263] Additionally, various adeno-associated virus (AAV) vector systems have been developed for gene delivery. AAV vectors can be readily constructed using techniques well known in the art. SFE U.S. Pat. Nos. 7,078,387; 5,173,414; and 5,139,941; International Publication Nos. WO 92/01070 (published 23 Jan. 1992) and WO 93/03769 (published 4 Mar. 1993); Lebkowski et al., Molec. Cell. Biol. (1988) 8:3988-3996; Vincent et al., Vaccines 90 (1990) (Cold Spring Harbor Laboratory Press); Carter, B. J. Current Opinion in Biotechnology (1992) 3:533-539; Muzyczka, N. Current Topics in Microbiol. and Immunol. (1992) 158:97-129; Kotin, R. M. Human Gene Therapy (1994) 5:793-801; Shelling and Smith, Gene Therapy (1994) 1:165-169; and Zhou et al., J. Exp. Med. (1994) 179:1867-1875. Recombinant adeno-associated viruses (“AAVs”), can be of or derived from any suitable type of AAV including, e.g. AAV1, AAV2, AAV3, AAV4, AAV5, AAV6, AAV7, AAV8, AAV9, AAV10, AAV11, and AAV12, as described for example in Flotte, T R and Berns, K I., Hum Gene Ther. 2005; 16(4):401-407. doi:10.1089/hum.2005.16.401.

[1264] A number of retroviral systems also have been described that might be used in certain aspects of the invention. Examples of such vector systems are described in, e.g., U.S. Pat. No. 5,219,740; Miller et al. (1989) BioTechniques 7:980; Miller, A. D. (1990) Human Gene Therapy 1:5; Scarpa et al. (1991) Virology 180:849; Burns et al. (1993) Proc. Natl. Acad. Sci. USA 90:8033; Boris-Lawrie et al. (1993) Cur. Opin. Genet. Develop. 3:102; GB 2200651; EP 0415731; EP 0345242; WO 89/02468; WO 89/05349; WO 89/09271; WO 90/02806; WO 90/07936; WO 90/07936; WO 94/03622; WO 93/25698; WO 93/25234; WO 93/11230; WO 93/10218; WO 91/02805; in U.S. Pat. Nos. 5,219,740; 4,405,712; 4,861,719; 4,980,289 and 4,777,127; in U.S. Ser. No. 07/800,921; and in Vile' (1993) Cancer Res 53:3860-3864; Vile (1993) Cancer Res 53:962-967; Ram (1993) Cancer Res 53:83-88; Takamiya (1992) J Neurosci Res 33:493-503; Baba (1993) J Neurosurg 79:729-735; Mann (1983) Cell 33:153; Cane (1984) Proc Natl Acad Sci USA 81; 6349; and Miller (1990) Human Gene Therapy 1. In some embodiments, recombinant nucleic acids can be transferred into target cells, such as T cells, using recombinant lentiviral vectors or retroviral vectors, such as gamma-retroviral vectors (SFE Koste et al. (2014) Gene Therapy 2014 April 3. doi: 10.1038/gt.2014.25; Carlens et al. (2000) Exp Hematol 28(10): 1137-46; Alonso-Camino et al. (2013) Mol Ther Nucl Acids 2, e93; Park et al., Trends Biotechnol. 2011 November; 29(11): 550-557. A number of illustrative retroviral systems have been described (e.g., U.S. Pat. Nos. 5,219,740; 6,207,453; 5,219,740; Miller and Rosman (1989) BioTechniques 7:980-990; Miller, A. D. (1990) Human Gene Therapy 1:5-14; Scarpa et al. (1991) Virology 180:849-852; Burns et al. (1993) Proc. Natl. Acad. Sci. USA 90:8033-8037; and Boris-Lawrie and Temin (1993) Cur. Opin. Genet. Develop. 3:102-109. Methods of lentiviral transduction are known. SFE Wang et al. (2012) J. Immunother. 35(9): 689-701; Cooper et al. (2003) Blood. 101:1637-1644; Verhoeyen et al. (2009) Methods Mol Biol. 506: 97-114; & Cavalieri et al. (2003) Blood. 102(2): 497-505.

[1265] Additional viral vectors which will find use for delivering the nucleic acid molecules encoding the antigens of interest include those derived from the pox family of viruses, including vaccinia virus and avian poxvirus. An example of such a vector system useful for delivering polynucleotides is the recombinant poxvirus vaccines described by Small, Jr., P. A., et al. (U.S. Pat. No. 5,676,950, issued Oct. 14, 1997, herein incorporated by reference). Vaccinia virus-based infection/transfection systems can be conveniently used to provide for inducible, transient expression of the coding sequences of interest in a host cell. SFE Elroy-Stein and Moss, Proc. Natl. Acad. Sci. USA (1990) 87:6743-6747; Fuerst et al., Proc. Natl. Acad. Sci. USA (1986) 83:8122-8126.

[1266] Alternatively, avipoxviruses, e.g., the fowlpox & canarypox viruses, can also be used to deliver constructs. Recombinant avipox viruses, expressing immunogens from mammalian pathogens, are known to confer protective immunity when administered to non-avian species. The use of an avipox vector is particularly desirable in human and other mammalian species since members of the avipox genus can only productively replicate in susceptible avian species and therefore are not infective in mammalian cells. Methods for producing recombinant avipoxviruses are known in the art and employ genetic recombination, as described above with respect to the production of vaccinia viruses. SFE WO 91/12882; WO 89/03429; and WO 92/03545.

[1267] Members of the Alphavirus genus, such as, but not limited to, vectors derived from the Sindbis, Semliki Forest, and Venezuelan Equine Encephalitis viruses, will also find use as viral vectors for delivering the polynucleotides of the present invention (for example, a synthetic Gag-polypeptide encoding expression cassette). For a description of Sindbis-virus derived vectors ATAOTI, see, Dubensky et al., J. Virol. (1996) 70:508-519; and International Publication Nos. WO 95/07995 and WO 96/17072; as well as U.S. Pat. Nos. 5,843,723 and 5,789,245.

[1268] Another type of viral vector that can be employed with polynucleotides and methods of the invention is a papillomaviral vector. Suitable papillomaviral vectors are known in the art and described in, e.g., Hewson (1999) Mol Med Today 5(1):8, Stephens (1987) Biochem J 248(1):1-11, and U.S. Pat. No. 5,719,054. Particularly preferred papillomaviral vectors are provided in, e.g., International Patent Application WO 99/21979. [00367] Alphavirus vectors can be gene delivery vectors in other contexts. Alphavirus vectors are known in the art and described in, e.g., Carter (1992) Curr Opinion Biotech 3:533-539, Muzcyzka (1992) Curr Top Microbiol Immunol. 158:97-129, Schlesinger Expert Opin Biol Ther. 2001 March; 1(2): 177-91, Polo et al. Dev Biol (Basel). 2000; 104:181-5, Wahlfors et al. Gene Ther. 2000 March; 7(6):472-80, Colombage et al. Virology. 1998 Oct. 10; 250(1):151-63, and International Patent Applications WO 01/81609, WO 00/39318, WO 01/81553, WO 95/07994, and WO 92/10578.

[1269] Another group of viral vectors are the herpes viral vectors. Examples of herpes viral vectors are described in, e.g., Lachmann et al., Curr Opin Mol Ther 1999 October; I(5):622-32, Fraefel et al., Adv Virus Res. 2000; 55:425-51, Huard et al., Neuromuscul Disord. 1997 July; 7(5):299-313, Glorioso et al., Annu Rev Microbiol. 1995; 49:675-710, Latchman, Mol Biotechnol. 1994 October; 2(2): 179-95, and Frenkel et al., Gene Ther. 1994; 1 Suppl S40-6, as well as U.S. Pat. Nos. 6,261,552 and 5,599,691.

[1270] Still another example of a viral vector is a flaviviral vector. Examples of suitable vectors are described in, e.g., Bonaldo et al., Mem Inst Oswaldo Cruz.2000; 95 Suppl 1:215-23, Caufour et al. Virus Res. 2001 Nov. 5; 79(1-2):1-14, Guirakhoo et al. J Virol. 2001 August; 75(16):7290-304, Pletnev et al. Virology. 2000 Aug. 15; 274(1):26-31, Guirakhoo et al. J Virol. 2000 June; 74(12):5477-85, and WO 93/06214 and WO 01/53467.

### iii. Bacterial/Cellular “Vectors”/Delivery Systems

[1271] In another aspect of the invention, one or more nucleic acid molecules of the invention can also be incorporated into and delivered by a cellular delivery system, such as an attenuated “bacterial vector,” such as an attenuated Salmonella typhimurium, e.g., the doubly attenuated (AroA-, dam-) strain of Salmonella typhimurium. Examples of suitable attenuated live bacterial vectors that can be transformed to incorporate a construct include Salmonella typhimurium, Salmonella typhi, Shigella species, Bacillus species, Lactobacillus species, Bacille Calmette-Guerin (BCG), Escherichia coli, Vibrio cholerae, Campylobacter species, Listeria species, or any other suitable bacterial vector, as is known in the art. Other cellular vectors/delivery systems are known in the art, such as nucleic acid construct loaded dendritic cell delivery systems mentioned elsewhere in this disclosure.

### iv. Vector Functional Characteristics

[1272] In some aspects, vectors incorporated in compositions of the invention or used in methods of the invention can also or alternatively be characterized on the basis of one or more functional properties. For example, In AOTI, one, some, most, or all vectors of the composition or method will be characterizable as being non-replicative, at least in stable composition, hosts receiving the vector as part of a treatment method, or both. Vectors also or alternatively can be characterized as non-infectious, not spreading from one organism to another. Vectors also or alternatively can be characterized as nonintegrating. While expression of integrated sequences from vectors that integrate into host genomes is possible and desirable in some aspects of biotechnology, in most aspects of the invention the vectors used in the compositions and methods described herein typically will persist in an episomal/extragenomic state. Vectors of the invention also will typically be non-pathogenic, such that, for example, viral vectors will have had most, substantially all, or all of known/consistent sequences associated with virus pathogen effects removed by deletion or modification.

[1273] In the case of viral vectors, modifications known in the art are required in order to render the viral vector sufficiently replication-incompetent (sometimes called replication-deficient) or non-infectious where such characteristics are desired. Typically, viral vectors will retain their ability to infect host cells. AAV vectors, which are naturally replication-deficient in the absence of complementing adenoviruses or at least adenovirus gene products (provided by, e.g., a helper virus, plasmid, or complementation cell), are one example of a replication-deficient vector. By “replication-deficient” is meant that the viral vector comprises a genome that lacks at least one replication-essential gene function. A deficiency in a gene, gene function, or gene or genomic region, as used herein, is defined as a deletion of sufficient genetic material of the viral genome to impair or obliterate the function of the gene whose nucleic acid sequence was deleted in whole or in part. Replication-essential gene functions are those gene functions that are required for replication (i.e., propagation) of a replication-deficient viral vector. The essential gene functions of the viral vector particle vary with the type of viral vector particle at issue. Examples of replication-deficient viral vector particles are described in, e.g., Marconi et al., Proc. Natl Acad. Sci. USA, 93(21), 11319-20 (1996), Johnson and Friedmann, Methods Cell Biol, 43 (pt. A), 211-30 (1994), Timiryasova et al., J. Gene Med, 3(5), 468-77 (2001), Burton et al., Stem Cells, 19(5), 358-77 (2001), Kim et al., Virology, 282(1), 154-67 (2001), Jones et al., Virology, 278(1), 137-50 (2000), Gill et al., J. Med. Virol, 62(2), 127-39 (2000), Chen and Engleman, J. Virol, 74(17), 8188-93 (2000), Marconi et al., Gene Ther., 6(5), 904-12 (1999), Krisky et al., Gene Ther., 5(11), 1517-30 (1998), Bieniasz et al., Virology, 235(1), 65-72 (1997), Strayer et al., Biotechniques, 22(3), 447-50 (1997), Wyatt et al., Vaccine, 14(15), 1451-8 (1996), and Penciolelli et al., J. Virol, 61(2), 579-83 (1987). Other replication-deficient vectors are based on simple MuLV vectors. SFE Miller et al. (1990) Mol Cell Biol 10:4239 (1990); Kolberg (1992) J NTS Res 4:43, and Cornetta et al. (1991) Hum Gene Ther 2:215). For a review of replication-incompetent chimpanzee-derived adenovirus, see U.S. Pat. No. 6,019,978. Human replication-deficient adenoviral vectors and systems and method for the production thereof are described in, e.g., US 20030087438, US 20030054553, US 20030040100, US 20020031831, and US 20030175245.

### v. Vector Size

[1274] Vectors of the invention can also or alternatively be characterized on the basis of size of the nucleotide sequences that make up the vector (or at least the nucleic acid portion of the vector).

[1275] In AOTI, the invention provides plasmid vectors that comprise sequences that are larger than sequences that can be usually incorporated into many viral vectors, such as adenoviral vectors. Thus, for example, In AOTI, the invention comprises compositions comprising and methods involving the use of one or more vectors that comprise nucleotide sequence of at least about 2.25 kb, such as at least about 2.5 kb, at least about 3 kb, or at least about 4 kb of sequences comprising one or more expression cassettes comprising sequences encoding one or more antigens and dendritic cell-binding domains or polypeptides (e.g., about 2-5 kb, about 2.1-4.9 kb, about 2.2-4.8 kb, about 2.25-4.75 kb, about 2-4 kb, about 2-3 kb, about 2.1-3.1 kb, about 2.3-3.3 kb, about 2.3-3.8 kb, or about 2.3-about 2.5 kb).

[1276] In an alternative aspect, the invention provides vectors that also or alternatively are minimized in terms of sequences outside of the expression cassette(s) of the vector(s), such as the MIP vectors described above. In one such aspect, one, some, most, generally all, or all of the vectors of a method or composition of the invention are characterized in comprising less than about 1.5 kb, less than about 1.25 kb, less than about 1 kb, less than about 0.85 kb, less than about 0.75 kb, less than about 0.5 kb, less than about 0.33 kb, or less than about 0.25 kb outside of the expression cassette or expression cassettes contained in the vector.

### vi. Multi-Gene and Multi-Cistronic Vectors

[1277] In AOTI, the invention provides vectors that express multiple products. In some aspects, the compositions and methods of the invention can comprise one or more vectors (or primarily comprise, generally consist of, or consist of one or more vectors) that comprise a plurality of nucleic acid sequences to be expressed in a host cell as separate transcripts (e.g., two or more expression cassettes), generate two or more cistrons (e.g., one more expression cassettes comprising coding sequences that are processed to form two or more discrete polypeptides when the coding sequences are expressed). It is worth noting that “expression” in its broadest sense can be understood as the process of converting genetic information encoded by nucleic acids into final end products. As such, expression in such contexts encompasses the processing of an initial, immature mRNA or PPT into a more stable form.

[1278] Vectors of the invention can include any suitable number of expression cassettes. Vectors comprising multiple expression cassettes can be referred to as “multi-gene” vectors. Typically, a vector of the invention will comprise 1-3 expression cassettes, 1-2 expression cassettes, or only a single expression cassette. Vectors comprising two or more expression cassettes or two or more coding sequences that when processed form two discrete transcripts can be described as “multi-gene vectors.”

[1279] Vectors of the invention can also or alternatively encode sequences that cause a single gene to be expressed as two or more expression products (cistrons). Such multicistronic vectors simultaneously express 2+ separate proteins from the same mRNA. E.g., a vector comprising two expression cassettes may be described as a “bicistronic” vector. A vector comprising 3 expression cassettes may similarly be described as a “tricistronic” vector.

[1280] In AOTI, the vector of a method or composition of the invention is a multi-cistronic (or multicistronic) vector, such as a bicistronic vector, wherein the vector comprises one or more nucleotide sequences that facilitate processing of an expression product to form two or more discrete expression products. Examples of such sequences that can be incorporated into such vectors include internal ribosome entry sites (IRES), furin cleavage sites, viral 2A peptide sequences, or any combination thereof. Vectors encoding the nucleotide sequences of IRES or 2A peptides are called “multicistronic” vectors, since they simultaneously express two or more separate proteins from the same mRNA, even where the mRNA is encoded by a single expression cassette. Example of such vectors are described in, e.g., Shaimardanova et al., Pharmaceutics 2019, 11(11), 580. Examples of 2A peptides, which can facilitate “ribosome skipping,” resulting in multiple expression products, are described elsewhere herein. An IRES can enable efficient translation of an mRNA lacking a 5′ cap structure and can act as another ribosome recruitment site, thereby resulting in co-expression of two proteins from a single mRNA. Exemplary expression vectors that employ di-cistronic mRNAs are pTR-DC/GFP described by Mosser et al., Biotechniques 22:150-161, 1997, and p2A5I described in Morris et al., Animal Cell Technology, 1997, pp. 529-534.

[1281] In aspects, a vector also or alternatively can comprise multiple expression cassettes, multiple promoters, or promoters with certain capabilities (such as bi-directional promoters) that drive expression of different transcription units. An example of a multi-gene vector derived from coronavirus capable of expressing three different expression products in target cells, including dendritic cells, is described in Volker Thiel et al., Journal of Virology August 2003, 77 (18) 9790-9798; DOI: 10.1128/JVI.77.18.9790-9798.2003. Similar multi-gene vectors have been developed using lentiviral vectors. SFE Zhu Y et al. Mol Ther. 2001; 4(4):375-382. doi:10.1006/mthe.2001.0469. Plasmids with multigene expression also are KITA. SFE Kriz A et al. Nat Commun. 2010; 1:120. doi:10.1038/ncomms1120.

[1282] In aspects, the vector or construct also or alternatively obtains multiple expression products through incorporation of a bidirectional promoter. Bidirectional promoter strategies are similarly known in the art. SFE Javan B et al. Life Sci. 2018; 202:140-151. doi:10.1016/j.lfs.2018.04.011; Lejard V et al. Plasmid. 2014; 74:1-8. doi:10.1016/j.plasmid.2014.05.001; Polson A et al. Plasmid. 2011; 66(3):169-179. doi:10.1016/j.plasmid.2011.08.004.

[1283] Also or alternatively still, splicing signals can be incorporated into a construct to generate several mature mRNAs from a single pre-mRNA expressed from an expression cassette. An example of such a splicing strategy for obtaining a multi-cistronic vector is described in, e.g., Zhu Y et al. Mol Ther. 2001; 4(4):375-382. doi:10.1006/mthe.2001.0469. Multicistronic vectors and methods, including splicing methods, are generally reviewed in de Felipe P. Polycistronic viral vectors. Curr Gene Ther. 2002; 2(3):355-378. doi:10.2174/1566523023347742 and are further exemplified in, e.g., Hildinger M et al. Gene Ther. 1999; 6(7):1222-1230. doi:10.1038/sj.gt.3300942.

[1284] The skilled reader of this disclosure can choose any combination of such approaches to making a multi-cistronic/multi-gene vector depending on the priority in the form of expression desired and the desired design of the relevant vector. For example, IRES sequences are typically large (over 500 bp) and can sometimes result in lower expression of the second gene product, located downstream of the IRES, than the first expression product, whereas in the case of 2A peptides there can be incomplete digestion of protein products, use of splicing signals can result in unintentional products and uncertain levels of expression products, and the use of multiple promoters or multiple expression cassettes can require large nucleotide sequences insertions into vectors and frequently can result in poor expression of one or both products encoded by the sequences of the vector. Thus, each known approach has tradeoffs, but all such methods can be used to suitably produce multiple expression products from a single vector where desired and where the possible negative effects of the system selected are outweighed by the benefits of a single multi-gene or multi-cistronic vector system.

[1285] Multi-cistronic constructs & compositions, and related PMCs that can be adapted to AOTI are further described in Mokrejs M, Vopálenský, Kolenaty O, et al. et al. IRESite: the database of experimentally verified IRES structures (www.iresite.org). Nucleic Acids Res. 2006; 34(Database issue):D125-D130. doi:10.1093/nar/gkj081 and Santana V C et al. PLoS One. 2013; 8(8):e71322. Published 2013 Aug. 8. doi:10.1371/journal.pone.0071322.

### vii. Targeted Vectors

[1286] In aspects, vector(s) in CEPESCs are targeted vectors. Targeted vector(s) comprise feature(s), that direct the vector to particular target(s), e.g., cell receptor(s), in TRs. In aspects, targeted vector(s) target ICR(s), such as ITIC receptor(s) (e.g., a DC receptor). In aspects, targeted vector(s) are viral vectors. Viral vectors, such as Vaccinia Virus (VV), Modified virus Ankara (MVA), certain lentiviral vectors, retroviral vectors, and Ad vectors exhibit targeting of DCs and other ICs. SFE Larocca C et al. Cancer J. 2011; 17(5):359-371. doi:10.1097/PPO.0b013e3182325e63; Sharma, P. K et al. Cancer Gene Ther 25, 27-38 (2018). https://doi.org/10.1038/s41417-017-0002-1; Bryson P D et al. J Vis Exp. 2013; (76):50606. doi:10.3791/50606; and US20150031625. E.g., Ad35 binds CD46, which is present on all types of DCs, and thus effectively targets such vectors to DCs. Viral vectors also can be modified to include heterologous PPTs that specifically bind targets, such as Ab AARSs against ICRs (SFE US20050003548 exemplifying the incorporation of Ab AARSs into fiber protein PPTs of recombinant Ad vectors & US20060286121 describing similar methods of targeting).

[1287] In aspects, targeted vectors are non-viral vectors, such as NAVs. Targeting compound-conjugated NAVs such as NAVs conjugated to PPTs/moieties targeting ICs, e.g., DCs, also are known in the art (SFE Anderson K et al. Bioconjug Chem. 2010; 21(8):1479-1485. doi:10.1021/bc1000824).

[1288] Vectors also can be targeted to internal targets. E.g., plasmid vectors can be conjugated to nuclear localization signals (NLSs) (e.g., Arg/Lys rich AARSs recognized by karyopherins such as importin a resulting in facilitated transport across the nuclear envelope) (SFE Hardee C L, et al. Genes (Basel). 2017; 8(2):65. Published 2017 Feb. 10. doi:10.3390/genes8020065.

[1289] Targeted vectors are known in the art as are methods for developing such vectors that can be adapted to AOTI. E.g., methods relevant to the generation of targeted vectors that can be adapted to AOTI are provided in US20080019988, WO1999041402, WO1999041368, and WO1999041369.

### viii. Multi-Vector/Muti-EPESNAM Compositions

[1290] In AOTI, the compositions and methods of the invention comprise 2+ vectors, (e.g., 2, 2-3, or 2-5 vectors); 2+ EPESNAM(s); or both. In aspects, each EPESNAM is contained in a separate vector or is a NAV. Thus, for example, compositions of the invention can comprise, e.g., 1-5 vectors, 1-4 vectors, or 1-3 vectors. The use of multiple vectors can offer several advantages, including ability to control dosage, ability to efficiently produce the different vectors, and the ability to “mix and match” various vector constructs for different applications. Thus, for example, in one aspect a method of the invention can comprise selecting one, two, three, or more vectors from a bank of vectors comprising antigen-encoding sequences that induce an immune response against a particular disease-causing agent. In AOTI, one or more of the multiple vectors in a multiple vector composition or method is a multicistronic vector. In AOTI, none of the vectors in a multi-vector composition or method are multicistronic vectors. Numerous specific examples of multiple vector compositions and methods are exemplified herein and provided by the invention. One such exemplary composition and method comprises one vector that comprises a gD:antigen fusion protein-encoding sequence and a second vector that comprises a non-antigen immunomodulator, such as an innate trained immunity immunomodulator (ITII), such as an EAT-2 polypeptide, or a cytokine, such as an interleukin. In another exemplary aspect, which can be reflected in a composition of the invention or method of the invention, at least a first vector, such as a plasmid vector, comprising a gD: antigen fusion protein-encoding sequence is combined with or used with a second plasmid vector comprising a different antigen-encoding sequence, which optionally may be associated with a targeting sequence/domain, a different innate cell activator sequence or polypeptide, or both.

### D. Compositions Comprising NAMs

[1291] CEPESC(s) are an AOTI. CEPESC(s) comprise 1+, 2+, 3+, or more NAMs (e.g., NAVs) that collectively comprise the CESs of the composition (all of the CS(s) encoding all of the EPs of the composition). In aspects, OSMGAOA of the NAMs, NAM molecules, or both are associated with one or more delivery agent(s) (DA(s)). In aspects, CEPESC(s) comprise one or more excipient(s). In aspects, CEPESCs comprise both. CEPESCs are suitable for pharmaceutical use, veterinary use, or both. Such compositions can be described as “pharmaceutical” or “veterinary” compositions.

### 1. Delivery Agents (TFA(s)) & Delivery Systems

[1292] In aspects, CEPESCs comprise delivery agent(s) associated with NAM(s). Combinations of NAM(s) and delivery agent(s) can be referred to as “delivery systems.” A delivery agent (“DA”) is any composition that DOS enhances the uptake of the NAM(s) resulting in expression of the ES(s) they contain. DAs also are referred to herein as transfection-facilitating agents or TFAs. Some aspects of DAs and other components of CEPESCs, such as PPT components of viral vectors, can overlap. Skilled readers will understand that such categorization(s) of CEPESC components are presented in a non-limiting manner as a matter of convenience in describing AOTI.

[1293] NAM(s) can be bound to, coated on, or contained in particle DAs (PDAs). In aspects, NDA(s) are coated with additional DA(s), e.g., cationic composition(s), targeting compositions (e.g., ligands for ICR(s)), or both. In aspects, NAMs are in viral vectors comprising viral nanoparticles or viral-derived nanoparticles. CEPESCs also can comprise virus-like particle PDA(s). As with NAMs, terms such as “particles” and “nanoparticles” typically refer to types of particles/nanoparticles and not specific particle molecules, which can, e.g., number in the millions in CEPESCs.

[1294] In aspects, TFA(s) are targeted to tissue(s), organ(s), or cell type(s). As also DEH, targeting method include incorporation of Ab AARS(s), ligand AARS(s), or other compounds, e.g., aptamers to ICR(s) or CpG(s) that are bound by DEC-205, etc., which are either bound directly to NAM(s) or are bound or otherwise associated with PDA(s) (e.g., a liposome PDA, a polymeric DA, or protein component(s) of a viral vector). Such and other PDA(s) can comprise, e.g., DNA binding proteins or polypeptides, liposomes, extracellular vesicles, exosomes, or other positively charged macromolecules used alone or in combination) that binds NAM(s) of the CEPSC. Extracellular vesicles are membranous vesicles released by a variety of cells into the extracellular microenvironment and include ectosomes or microvesicles (ii), exosomes and (iii), apoptotic bodies. Such materials are described in Raposa et al. J Cell Biol. 2013 Feb. 18; 200(4):373-83. doi: 10.1083/jcb.201211138. Targeting methods adaptable to PDA(s)/DA(s) are described in David et al. (2012), J Gene Med 14, 769-775; Deas, O et al. (2002), Human Gene Therapy 13, 1101-1114; Hyodo, M., et al. Journal of Controlled Release 14, 241-247; and Ye, C et al., Eur. J. Immunol., doi: 10.1002/eji.201445010. Transfection facilitating agent(s) also can include surface active agents, such as immune-stimulating complexes (ISCOMS), LPS analog(s) including monophosphoryl lipid A, muramyl peptides, quinone analogs, vesicles such as squalene and squalene, hyaluronic acid, lipids, liposomes, calcium ions, viral proteins, polyanions, polycations, or nanoparticles, or other known TFA(s). Polyanion and polycation TFAs are known, including poly-L-glutamate (LGS). In aspects, TFA(s) comprise poly-L-glutamate, lecithin liposomes or other liposomes known in the art (SFE WO9324640), or calcium ions. In AOTI, NAM(s) are CB DA/PDA full encapsulation, partial encapsulation, non-encapsulation (conjugation), or CT.

[1295] In AOTI, a conjugated lipid inhibits aggregation of lipid particles, including, polyethylene glycol (PEG)-lipid conjugates such as, e.g., PEG coupled to dialkyloxypropyls (e.g., PEG-DAA conjugates), PEG coupled to diacylglycerols (e.g., PEG-DAG conjugates), PEG coupled to cholesterol, PEG coupled to phosphatidylethanolamines, and PEG conjugated to ceramides, cationic PEG lipids, polyoxazoline (POZ)-lipid conjugates (e.g., POZ-DAA conjugates; polyamide oligomers (e.g., ATTA-lipid conjugates), and mixtures thereof. In some embodiments, PEG or POZ can be conjugated directly to the lipid or may be linked to the lipid via a linker moiety. Any linker moiety suitable for coupling the PEG or the POZ to a lipid can be used including, e.g., non-ester containing linker moieties and ester-containing linker moieties. In some embodiments, non-ester containing linker moieties, such as amides or carbamates, are used.

[1296] In some embodiments, an amphipathic lipid can have a hydrophobic portion that orients into a hydrophobic phase, and a hydrophilic portion orients toward the aqueous phase. In some embodiments, hydrophilic characteristics derive from the presence of polar or charged groups such as carbohydrates, phosphate, carboxylic, sulfato, amino, sulfhydryl, nitro, hydroxyl, and other like groups. In some embodiments, hydrophobicity can be conferred by the inclusion of apolar groups that include, but are not limited to, long-chain saturated and unsaturated aliphatic hydrocarbon groups and such groups substituted by one or more aromatic, cycloaliphatic, or heterocyclic group(s). Examples of amphipathic compounds include, but are not limited to, phospholipids, aminolipids, and sphingolipids.

[1297] Representative examples of phospholipids include, but are not limited to, phosphatidylcholine, phosphatidylethanolamine, phosphatidylserine, phosphatidylinositol, phosphatidic acid, palmitoyloleoyl phosphatidylcholine, lysophosphatidylcholine, lysophosphatidylethanolamine, dipalmitoylphosphatidylcholine, dioleoylphosphatidylcholine, distearoylphosphatidylcholine, and dilinoleoylphosphatidylcholine. Other compounds lacking in phosphorus, such as sphingolipid, glycosphingolipid families, diacylglycerols, and (3-acyloxyacids, are also within the group designated as amphipathic lipids. Additionally, the amphipathic lipids described above can be mixed with other lipids including triglycerides and sterols.

[1298] In some embodiments, a neutral lipid exists either in an uncharged or neutral zwitterionic form at a selected pH. In some embodiments, at physiological pH, such lipids include, for example, diacylphosphatidylcholine, diacylphosphatidylethanolamine, ceramide, sphingomyelin, cephalin, cholesterol, cerebrosides, and diacylglycerols.

[1299] In AOTI, a non-cationic lipid may be any amphipathic lipid or neutral lipid(s)/anionic lipid(s). In AOTI, an anionic lipid is negatively charged at physiological pH. Lipids include, e.g., phosphatidylglycerols, cardiolipins, diacylphosphatidylserines, diacylphosphatidic acids, N-dodecanoyl phosphatidylethanolamines, N-succinyl phosphatidylethanolamines, N-glutarylphosphatidylethanolamines, lysylphosphatidylglycerols, palmitoyloleyolphosphatidylglycerol (POPG), & other anionic groups joined to neutral lipids.

[1300] In some embodiments, a hydrophobic lipid has apolar groups that include, but are not limited to, long-chain saturated and unsaturated aliphatic hydrocarbon groups and such groups optionally substituted by one or more aromatic, cycloaliphatic, or heterocyclic group(s). Suitable examples include, but are not limited to, diacylglycerol, dialkylglycerol, N-N-dialkylamino, 1,2-diacyloxy-3-aminopropane, and 1,2-dialkyl-3-aminopropane. In some embodiments, the nucleic acid-lipid particle comprises: (a) a nucleic acid (e.g., an interfering RNA); (b) a cationic lipid comprising from about 50 mol % to about 65 mol % of the total lipid present in the particle; (c) a non-cationic lipid comprising from ˜25 mol %-˜45 mol % of the total lipid present in the particle; and (d) a conjugated lipid that inhibits aggregation of particles comprising from ˜5 mol %-10 mol % of the total lipid present in the particle.

[1301] In some embodiments, the nucleic acid-lipid particle comprises: (a) a nucleic acid (e.g., an interfering RNA); (b) a cationic lipid comprising from about 50 mol % to about 60 mol % of the total lipid present in the particle; (c) a mixture of a phospholipid and cholesterol or a derivative thereof comprising from about 35 mol % to about 45 mol % of the total lipid present in the particle; and (d) a PEG-lipid conjugate comprising from about 5 mol % to about 10 mol % of the total lipid present in the particle.

[1302] In some embodiments, the nucleic acid-lipid particle comprises: (a) a nucleic acid (e.g., an interfering RNA); (b) a cationic lipid comprising from about 55 mol % to about 65 mol % of the total lipid present in the particle; (c) cholesterol or a derivative thereof comprising from about 30 mol % to about 40 mol % of the total lipid present in the particle; and (d) a PEG-lipid conjugate comprising from about 5 mol % to about 10 mol % of the total lipid present in the particle. In some embodiments, a CRISPR/Cas system can be used for knocking down, such as reducing or suppressing, the expression of PD-L1 and/or PD-1 (SFE WO2015/161276). Exemplary features of CRISPR/Cas systems are described below and can be adapted for use in reducing or suppressing expression of a molecule, rather than disrupting or deleting a gene encoding the molecule, by using an enzymatically inactive nuclease. In some embodiments, a guide RNA (gRNA) targeting a gene encoding PD-L1 or PD-1, such as the CD274 or PDCD1 gene, or the promoter, enhancer or other cis- or trans-acting regulatory regions, can be introduced in combination with a modified Cas9 protein or a fusion protein containing the modified Cas9 protein, to suppress the expression of, e.g., knock-down, of the gene(s). In some embodiments, the Cas9 molecule is an enzymatically inactive Cas9 (eiCas9) molecule, which comprises a mutation, e.g., a point mutation, that causes the Cas9 molecule to be inactive, e.g., a mutation that eliminates or substantially reduces the Cas9 molecule cleavage activity. In aspects, the eiCas9 molecule is fused, directly or indirectly to, a transcription activator or repressor PPT.

[1303] One class of adjuvants that has been explored is cationic lipids. Cationic lipids can be easily manufactured and are safe and well tolerated in humans and other animals (Nabel, G. J., et al., Proc Natl. Acad Sci U.S.A., 90:11307-11311 (1993); and Parker, S. E., et al., Hum. Gene Ther., 6:575-590 (1995)). Vaxfectin® is a recently introduced adjuvant for DNA vaccines that consists of an equimolar mixture of the cationic lipid GAP-DMORIE [(±)-N-(3-aminopropyl)-N,N-dimethyl-2,3-bis(cis-9-tetradecenyloxy)-1-propanaminium bromide)] and a neutral colipid DPyPE (1,2-diphytanoyl-sn-glydero-3-phosphoethanolamine) (Hartikka, J., et al., Vaccine, 19:1911-1923 (2001)). Vaxfectin® is dose-sparing, enhances production of antigen-specific antibody in small animals, including virus-neutralizing antibody, and can induce immunity to a variety of infections (Hartikka, J., et al., Vaccine, 19:1911-1923 (2001); Nukuzuma, C., et al., Viral Immunol., 16:183-189 (2003); Hermanson, G., et al., Proc Natl. Acad Sci U.S.A., 101: 13601-13606 (2004); Sedegah, M., et al., Vaccine, 24:1921-1927 (2006); Hahn, U. K., et al., Vaccine, 24:4595-4597 (2006); Margalith, M., et al., Genet. Vaccines. Ther., 4:2 (2006); and Jimenez, G. S., et al., Hum. Vaccin., 3:157-164 (2007)).

### i. Material Composition

[1304] As exemplified above, CEPESCs can comprise any suitable number of DAs of any suitable composition. In aspects, CEPESCs comprise 2+, 3+, or more DAs associated with SMGAOA of the NAMs of a CEPESC. In aspects, CEPESCs comprise a single type DA, which can comprise several components of different origins/compositions or a single type of origin (e.g., as in the case of a viral particle in a viral vector). In aspects, CEPESCs comprise solid nanoparticle(s). In aspects, CEPESCs comprise liposome DA(s), which in aspect(s) also are nanoparticle(s) (however, some liposomes are microparticles, such as monophosphoryl lipid A (MPLA), phospholpipid:cholesterol, or phosphotidylcholine:cholesterol liposomes). In aspects, CEPESCs comprise VLP DAs. In aspects, CEPESCs comprise polymeric DAs (e.g., Poly(lactide-co-glycolide) (PLGA), Poly(lactic acid) (PLA), or chitosan polymers). Examples of such PDA/DA materials include CTAB-PLG particles. (SFE Intl Application Number PCT/US99/17308). In aspects, DAs comprise inorganic nanoparticles (e.g., gold nanoparticles silica nanoparticles, or CaPNP(s). In aspects, DAs PC, GCO, SCO or CO of CaPNP(s).

[1305] PDAs can comprise, primarily comprise, GCO, or CO dendrimers, lipids, liposomes (e.g. unilamellar or multilammelar vesicles (including those composed of biodegradable phospholipids such as phosphatidylserine, phosphatidylcholine, and/or cholesterol), or proteins. In aspects, DAs comprise small unilamellar vesicles (SUVs) or large unilamellar vesicles (LUVs). In aspects, DAs comprise collagen, chitosan, hyaluronic acid, or a polymer, such as for example a homopolymer or a copolymer, e.g., those DEH (e.g., PLGA polymers). Use of PLGA polymers to deliver compositions to DCs adaptable to AOTI is described in Jilek et al., Adv Drug Deliv Rev. 2005 Jan. 10; 57(3):377-90. In aspects, liposomes are cationic, comprising, e.g., imidazolium derivatives (WO95/14380), guanidine derivatives (WO95/14381), phosphatidyl choline derivatives (WO95/35301), piperazine derivatives (WO95/14651), or biguanide derivatives. Liposome compositions and methods adaptable to AOTI are provided in, e.g., Hug and Sleight, Biochim. Biophys. Acta. (1991) 1097:1-17; Straubinger et al., in Methods of Enzymology (1983), Vol. 101, pp. 512-527. Lipsome materials designed for NAM/NAV transfection are commercially available (e.g., Lipofectin™).

[1306] PDAs can comprise calcium compounds, such as for example calcium sulfates, or calcium phosphates (e.g., calcium phosphate, such as for example amorphous calcium phosphate, as primary particle materials, coating agents, or both. In AOTI, DAs of CEPESCs PCGCOSCO or CO calcium phosphate particles having greater than 75% amorphous content, e.g., greater than about 80%, ≥˜85%, ≥˜90%, or even greater, e.g., ≥˜95% amorphous content), crystalline or poorly crystalline apatitic calcium phosphate (e.g., a calcium phosphate comprising a synthetic material not necessarily restricted to 1 calcium phosphate phase), dicalcium phosphate dihydrate, tricalcium phosphate, tetracalcium phosphate, monetite, monocalcium phosphate monohydrate, octacalcium phosphates, hydroxyapatites, or carbonated or otherwise substituted/modified versions of such calcium phosphates). Aspects of these and other calcium-based DAs adaptable to CEPESCs are described in WO00/15194; He Q et al. Clin Diagn Lab Immunol. 2000 November; 7(6):899-903; Temchura V V et al. Biomaterials. 2014 July; 35(23):6098-105; U.S. Pat. No. 8,309,134B2; Amini Y, et al Biotechnol Bioprocess Eng. (2016) 21:653-8; WO00/46147, Benvenisty et al (1986) PNAS 83:9551-55, Wigler et al. (1978), Cell 14:725, & Coraro et al. (1981) Somatic Cell Genetics 7:603)

[1307] In aspects, CEPESCs comprise CaPNP nanoparticles. In aspects, the only TFAs in the CEPESC are the CaPNPs or materials associated directly with the CaPNPs (e.g., functionalizing agents). In aspects, CEPESCs comprise functionalized CaPNP(s). Functionalizing agents associated with CaPNP(s) comprise lipids, polycations, polyanions, citrates, and compositions. Examples of functionalizing agents include polyethyleneimine, poly-lysine, and combinations. Additional examples of such AOTI are DEH & U.S. Pat. No. 8,309,134.

[1308] In aspects the materials that make up DAs are non-toxic. In aspects, most, generally all, substantially all, or all of such materials are biodegradable in TR cells. Biodegradable DAs are known. E.g., biodegradable polymers for NAM delivery adaptable to AOTI are described in Thomas T J, et al. Molecules. 2019; 24(20):3744. doi:10.3390/molecules24203744. A specific example of such materials are biodegradable poly(ortho ester) materials, SFE Wang et al., Nat. Mater., 2004; 3(3):190-6.

[1309] Nanoparticle DAs can comprise coating compositions that can facilitate stability, transfection, targeting, etc. E.g., a coating composition can comprise a molar ratio of 20-60% cationic lipid; 5-25% non-cationic lipid; about 25-55% sterol; and 0.5-15% PEG-modified lipid. Examples of cationic lipids include 2,2-dilinoleyl-4-dimethylaminoethyl-[1,3]-dioxolane (DLin-KC2-DMA), dilinoleyl-methyl-4-dimethylaminobutyrate (DLin-MC3-DMA), and di((Z)-non-2-en-1-yl) 9-((4-(dimethylamino)butanoyl)oxy)heptadecanedioate. In aspects, CEPESCs comprise cationic lipid(s) that are ionizable. In aspects, CEPESCs comprise non-cationic lipid(s) that are neutral lipid(s). In aspects, CEPESC(s) comprise a cholesterol sterol component. Examples of cationic lipid DAs are described in US20200038499.

[1310] In aspects, DAs comprise polyethylenimine (PEI) particles, e.g., in which NAMs are bound through condensation. Examples of such DAs, including targeted DAs comprising PEI particles, adaptable to AOTI are discussed in Pandey A P et al. Mater Sci Eng C Mater Biol Appl. 2016; 68:904-918. doi:10.1016/j.msec.2016.07.066.

[1311] In aspects, DAs comprise biodegradable polyethyleneimine-functionalized polyhydroxybutyrate nanoparticles (PHB-PEI NPs). Examples of such particles adaptable to AOTI are described in Conte R et al. Int J Mol Sci. 2020; 21(3):869. Published 2020 Jan. 29. doi:10.3390/ijms21030869.

[1312] In aspects, PDAs are magnetic particles. In aspects, PDAs are carbon-based particles. In aspects, PDAs are carbon magnetic particles. Examples of such particles are described in, e.g., U.S. Pat. No. 9,107,858.

[1313] In AOTI, TFA(s) comprises calcium phosphate nanoparticles (CaPNPs). In AOTI, CaPNP(s) are multi-layer CaPNP(s). In aspects, the composition comprises a multi-layer CaPNP structure comprising a CaPNP core and at least one CaPNP outer layer that encompasses one or more NAM(s).

### iii. Size Characteristics

[1314] In aspects, most, generally all, substantially all, or all of the DAs/PDAs of a CEPESC are sized such that the composition and accompanying NAM(s) can be taken up by ICs, e.g., macrophages, DCs, NKCs, T-cells, or combination(s). Also or alternatively, a delivery system can have an average size or a maximum size such that the CEPESC can be delivered by an intramuscular injection using standard sized injection needle(s).

[1315] In aspects, CEPESC(s) comprise DA(s) less than 2 microns in size. In aspects, CEPESC(s) comprise, primarily comprise, generally comprise, or only comprise nanoparticle-sized DA(s). Nanoparticle DA(s) are made of pharmaceutically suitable materials that enhance cellular uptake of NAM(s) and that on average, in maximum diameter, or both, are less than 1 micron in size (or that are generally, substantially only, or only less than 1 microns in size). In aspects PDAs PCGCOSCO or CO PDAs of less than 0.7 microns, less than 0.5 microns, or less than 0.4 microns in size. In aspects, PDAs are on average, generally, substantially only, or only, less than 0.35 microns or 0.25 microns in size (e.g., 5-350 nm, such as 50-300 nm, e.g., 100-250 nm, 150-225 nm, or 180-215 nm). In aspects, DAs, such as PDAs are less than about 0.15 microns, less than about 0.1 microns, less than about 0.05 microns, less than 0.025 microns, or less than 0.01 microns in average size or maximum size.

[1316] According to certain embodiments, the nanoparticles of a delivery mechanism have an average diameter of less than 300 nm in any one direction in size (“diameter” as used herein being used to describe the largest dimension of a nanoparticle used for or used as part of a delivery mechanism even if the nanoparticle is not exactly spherical), such as for example less than about 250 nm in diameter, less than about 225 nm in diameter, less than about 200 nm in diameter, less than about 175 nm in diameter, less than about 150 nm in diameter, or less than about 125 nm in diameter, such as less than about 100 nm, less than about 75 nm, less than about 50 nm, or less than about 25 nm in diameter, such as for example having an average diameter of between about 10 nm and about 200 nm, between about 25 nm and about 175 nm, between about 50 nm and about 150 nm, such as between about 75 nm and about 125 nm. In some aspects, a nanoparticle delivery mechanism can comprise a nanoparticle having an average size of less than 10 nm, such as about 10 nm, about 8 nm, about 6 nm, about 4 nm, or about 2 nm.

[1317] In aspects, PDA(s) have a mean or maximum diameter of from about 30 nm to about 150 nm, from about 40 nm to about 150 nm, from about 50 nm to about 150 nm, from about 60 nm to about 130 nm, from about 70 nm to about 110 nm, from about 70 nm to about 100 nm, from about 80 nm to about 100 nm, from about 90 nm to about 100 nm, from about 70 to about 90 nm, from about 80 nm to about 90 nm, from about 70 nm to about 80 nm, or about 30 nm, 35 nm, 40 nm, 45 nm, 50 nm, 55 nm, 60 nm, 65 nm, 70 nm, 75 nm, 80 nm, 85 nm, 90 nm, 95 nm, 100 nm, 105 nm, 110 nm, 115 nm, 120 nm, 125 nm, 130 nm, 135 nm, 140 nm, 145 nm, or150 nm.

[1318] In some aspects, the nanoparticle is sized to be capable of being DOS phagocytized by ICs, such as ITIC(s), e.g., macrophage(s), in TR(s).

### iii. Physical Characteristics of PDA/DAs

[1319] In AOTI, PDAs comprise, PC, GCO, or CO solid PDA(s). In aspects, NAM(s) are contained in such PDA(s). In aspects, NAM(s) are conjugated to part of such PDA(s). In aspects, NAM(s) are bound to most, generally all, or all of the surface of such PDA(s) or areas intended to be associated with NAM(s) (NAM-associated area(s) that make up less than all of the PDA.

[1320] In aspects, PDA(s) comprise a layered design, such as several bioresorbable layers, with NDA(s) contained in one or more layers allowing for sustained or modulated release of NAM(s). In aspects, each such layer comprises a different amount of NAM(s), different types of NAM(s), or both. In certain aspects, such a layered design allows for multiple doses of an accompanying active, such as the compositions described herein. In aspects, layers of PDAs have the same resorption rate. In aspects, layers of layered PDA(s) have different resorption rates.

[1321] In aspects, PDAs have defined crystallinity characteristics and/or crystal size. The crystallinity of the material of which the nanoparticle is comprised can be any crystallinity suitable for providing the desirable characteristics of composition delivery. The crystallinity and/or crystal size of a given nanoparticle delivery mechanism DOS impact the dissolution or resorption rate of the PDA. In aspects, PDAs comprise non-crystalline or poorly crystalline material(s). Examples of a highly crystalline material suitable for the present invention is a hydroxyapatite, such a highly crystalline material being weakly resorbable. Examples of a material comprising a less crystalline structure include more amorphous calcium phosphates.

[1322] PDA(s) can have any suitable shape(s). In aspects, PDA(s) are generally spherical in shape, that is, for example, varying in diameter in any two directions by no more than approximately 50%, such as no more than about 50%, no more than about 45%, no more than about 40%, no more than about 35%, no more than about 30%, no more than about 25%, no more than 20%, or for example by no more than about 15%, no more than about 10%, or for example by no more than about 5%. In aspects, PDA(s) have an average diameter standard deviation of no more than 25% of the average diameter, such as for example no more than about 25%, no more than about 20%, no more than about 15%, no more than about 10%, or for example no more than about 5% of the average diameter. In aspects, PDAs are mostly or generally spherical in shape yet the total population of nanoparticles present in the administered formulation can comprise PDAs of significantly disparate shapes or sizes, such as for example the total population of PDAs having an average diameter standard deviation of more than 25% of the average diameter, such as for example more than about 25%, more than about 30%, more than about 35%, more than about 40%, more than about 45%, more than about 50%, more than about 55%, more than about 60%, more than about 65%, more than about 70%, more than about 75%, more than about 80%, more than about 85%, more than about 90%, more than about 95%, or even more, such as for example even more than 100%. In aspects, PDAs comprise, generally comprise, or consist of particles having a non-spherical shape, e.g., having a disc-like (e.g. somewhat circular and flat) or needle-like shape.

[1323] In aspects, PDAs have a smooth surface or a rough surface. In aspects, PDA(s) have a rough surface that DOS induces IR(s). A rough surface can comprise an incongruent, non-smooth, or varied the surface, for example the surface having areas of increased height or increased depth in some or many areas, as in for example caused by an etching process).

[1324] In aspects, PDAs are porous. In aspects, porous PDA(s) have a specific minimum, average, or maximum porosity. In aspects, the porosity of PDA(s) DOS enhances resorption of the PDA(s). Porosity characteristics of nanoparticles adaptable to such AOTI are described in WO20000015194.

[1325] In aspects, SMGAOA PDAs of CEPESCs are mostly, generally, or only composed of materials that are bioresorbable (or “resorbable”)—i.e., materials capable of generally or entirely dissolving or being absorbed by the TR tissue(s) within suitable periods of time, e.g., before the occurrence of DOS instances of PDA-associated granulomas. In aspects, PDAs are substantially or completely bioabsorbed to nondetectable levels within 2 months, within 1 month, or less, e.g., 1-24 days, or 1-14 days, 1-10 days, or 1-8 days.

### iv. Functional Properties

[1326] In aspects, PDAs are suitable for administration according to intended delivery methods, such as intramuscular injection, mucosal administration, or other suitable method. In aspects, PDA(s) do not lead to a rapid uptake of the nanoparticles by the reticuloendothelial system (RES), preventing the compositions from reaching targeted cells. In aspects, PDA(s) DOS induce uptake of associated NAM(s) into cells (e.g., target cell(s)), release of NAM(s) into the cytoplasm, uptake of NAM(s) into the nucleus, protection/stability of the NAM(s), expression of the NAM(s), and induction of IR(s). In aspects, CEPESCs do not DOS induce formation of granuloma(s). do not DOS impair quality of tissue (e.g., muscle), or both. In aspects, CEPESCs are DOS transfected in APCs (e.g., DCs). In aspects, CEPESC(s) are shelf-stable for significant periods of time under typical storage conditions, e.g., at RT or ambient temperatures (e.g., 10-50 or 10-40 degrees C. & 40-80% relative humidity). Such CEPESCs do not require cold chain storage to be effective.

[1327] In aspects, PDA(s) comprise material(s) or composition(s) that effectively target particular cells, such as IC(s), e.g., ITIC(s), e.g., DCs. A PDA can comprise one or more ligands for cellular targets. E.g., a PLGA polymer composition can comprise Toll like receptor (TLR) 3 and 7 ligands, was then targeted to distinct DC cell-surface molecules. Such compositions are exemplified in Cruz L J et al. J Control Release. 2014; 192:209-218. doi:10.1016/j.jconrel.2014.07.040. Compositions comprising DC-targeting ligands (e.g., DEC-205 ligands) that can be adapted to PDA/DA compositions are described in US 2013/0142864 & WO2005018610 and Saluja S S et al. Int J Nanomedicine. 2014; 9:5231-5246. doi:10.2147/IJN.S66639.

[1328] In aspects, DAs/PDAs have adjuvant properties (DOS enhancing IR(s) induced by antigen(s), inducing non-specific IR(s), or both). E.g., in aspects, PDAs comprise, generally consist of, or consist of calcium phosphate nanoparticles that independently DOS induce IR(s), such as, e.g., B cell IR(s), T-cell IR(s), or both. Other types of PDAs with adjuvant properties are DEH.

### iv. Concentration Characteristics

[1329] PCA(s) and NAM(s) of CEPESCs can be present in any suitable concentration/relationship. In AOTI, the density of PDA(s) in the CEPESC DOS enhances adherence, attachment, or encompassing of the CEPES NAM(s). In AOTI, density of PDAs, such as CaPNPs is between ˜2 g/cm³ and ˜4 g/cm³, e.g., about 2.2, 2.6, 2.8, 3, 3.25, 3.5, or 3.6 and 3.8, 4, 4.25, 4.5, or 5 g/cm³.

[1330] In aspects, most, generally all, or substantially all PDAs in a formulation do not DOS agglomerate. In aspects, about 50% or more (e.g., 60%, 75%, 90% or more) of PDAs remain suspended after 20 hours, 40 hours, 72 hours, 96 hours, or 120 hours or more.

[1331] The amount of NAM(s) in the composition will be amounts that are expected or demonstrated to be effective in inducing CE(s) in intended TR(s) and, accordingly, will vary based on the nature of the NAM(s) (e.g., composition, coding sequences, etc.), nature of PDAs and other CEPESC components, the intended TR recipients (e.g., in terms of metabolism, weight, etc.), and the like. In general, the amount of NAM(s) will be an amount that is expected or demonstrated (e.g., through one or more preclinical studies, clinical studies, or both, in TR(s)) to DOS induce IR(s), DOS induce CE(s), or to be considered to treat or prevent a DCA-associated condition/disease. In general, the amount of NAMs can be similar to those effectively used for induction of IR(s) or CE(s) in corresponding vector systems used in the art, as exemplified/described elsewhere herein and in various references DEH (use of NAVs as DNA vaccines, e.g., is reviewed in Liu et al. (2011), Immunol Rev. 239(1): 62-84). In aspects, NAM(s) are present in a concentration about 1 μg to about 10 mg (e.g., about 5 μg to about 10 mg, about 5 μg to about 5 mg, about 1 mg to about 5 mg, about 1 μg to about 2 mg, about 1 μg to about 1 mg, about 1 μg to about 500 μg, 1 μg to 100 μg, about 1 μg to about 50 μg, or 1 μg to 10 μg, e.g., 5-100 μg, e.g., 5-75, 2-50, 2-40, or 2.5-25 μg. In aspects, NAM(s) are present in a volume of about 0.25 mL, about 0.5 mL, 0.75 mL, about 1 mL, or about 2 ML (e.g., 0.1-3, 0.2-2.6, 0.25-2.5 mL).

[1332] Viral vectors compositions can comprise any suitable number of particles and any suitable concentration of such particles. Examples of concentrations/amounts of such particles that are suitable are DEH and in various references incorporated herein. In aspects, viral vectors comprise at least about 1×10³ viral vector particles in a volume of about 1 mL (e.g., at least about 1×10³ to about 1×10⁸ particles in about 1 mL). In aspects, viral vectors are present in an amount of at least about 1×10⁶, about 1×10⁷, about 1×10⁸, about 1×10₉, or more particles/mL).

[1333] In aspects, CEPESCs comprise NAM(s) and PDA(s) in NAM/PDA ratio of about 1:1 to about 1:40, e.g., about 1:2 to about 1:20, e.g., about 1:3 to about 1:12, about 1:2 to about 1:12, about 1:3 to about 1:9, about 1:2 to about 1:8, about 1:3 to about 1:6, about 1:1 to about 1:5, about 1:2 to about 1:5, or about 1:3 to about 1:5. E.g., CEPESCs can comprise about 0.5-500 micrograms NAM and about 0.5-10,000 micrograms PDA, such as about 1-5,000 micrograms PDA, e.g., about 1.5-3000 micrograms PDA, about 1.75-3000 micrograms PDA, or about 2-2000 micograms PDA, e.g., CaPNP.

### v. Functionalization

[1334] PDAs/DAS can be non-functionalized or functionalized (e.g., can have further elements such as molecules attached to them to aid in their function). E.g., PDA/DA materials can be functionalized with polycation, polyanion, or lipid attached, e.g., on the surface of the PDA/DA. Functional group(s)/composition(s) can be AW the rest of a PDA (e.g., a core particle) by any suitable means, including, e.g., electrostatic association, hydrogen bonding, dipole-dipole interaction, and/or van der Waals-type forces. In some aspects, PDAs such as calcium phosphate nanoparticles can be functionalized with substances such as but not limited to lipids, polycations, polyanions, or citrate. In certain aspects, a functionalized nanoparticle can be charged.

[1335] PDAs can incorporate resorption factor(s) DOS impacting the rate at which the nanoparticles are absorbed. Such resorption factors can be any biologically compatible or inert factor capable of modifying the resorption time of the PDA/nanoparticle. Such factors may be attraction factors, such as those which attract phagocytic or osteogenic cells, or such factors may be inhibitory factors, such as phagocytic cell activity inhibitors. Exemplary attraction factors can include but may not be limited to interleukin-1, lymphotoxin, or calcitonin. Exemplary inhibitory factors can include but may not be limited to neutral phosphate, glucocorticoids, plicamycin, gallium nitrate. Such resorption factors may, in certain embodiments, be adjuvants. According to certain embodiments, the compositions described herein are delivered to a recipient using a nanoparticle delivery mechanism having one or more resorption factors incorporated therein or thereon.

[1336] In AOTI, PDAs are functionalized with polycations. Such polycations can be any polymeric-type molecule capable of providing a net cationic charge to the nanoparticles. Such net cationic charge can reduce nanoparticle agglomeration and/or aid in attachment of an active. In AOTI, the charge associated with the net cationic charge to the nanoparticle is associated with the main cationic polymer chain. In AOTI, the charge associated with the net cationic charge to the nanoparticle is associated with one or more side chains of the cationic polymer chain. In aspects, charge(s) can be associated with both the main cationic polymer chain and one or more side chains.

[1337] In AOTI, a cationic polymer serving to functionalize the nanoparticle delivery mechanism can have a molecular weight of less than 20,000 kD, e.g., less than about 18,000 kD, less than about 16,000 kD, less than about 14,000 kD, less than about 12,000 kD, or less than about 10,000 kD, such as for example less than approximately 8,000 kD, less than approximately 6,000 kD, less than approximately 4,000 kD, or for example even less, such as less than approximately 2,000 kD. In some aspects, any one or more side chains of the main cationic polymer chain has a molecular weight or degree of polymerization that is less than the main chain from which it extends.

[1338] According to aspects, polycation functionalizing agents can include but may not be limited to polyethyleneimine (PEI), PEI in some aspects being a branched polymer having about 20-30% primary amine groups, 40-60% secondary amine groups, and 20-30% tertiary amine groups; polyamines; polylysine, e.g., having about 25 to about 30 L-Lysine repeating units); cationic oligopeptide polymers, e.g., macromolecules containing between 2-12 amino acid repeating units; polyarginine; protamines; and/or diethylaminoethyl-dextran (DEAE-dextran); or any other similar or equivalent such polycations sufficient to provide the desired delivery mechanism characteristics of the composition such as means of administration, dissolution time, and/or for example, characteristics such as composition stability.

[1339] In AOTI, PDAs, e.g., nanoparticles, can be functionalized with polyanions. Such polyanions can be any polymeric-type molecule capable of providing a net anionic charge to nanoparticles. Such net anionic charge can reduce nanoparticle agglomeration and/or aid in attachment of an active. In aspects, the charge associated with the net anionic charge to the nanoparticle is associated with the main anionic polymer chain. In aspects, the charge associated with the net anionic charge to the nanoparticle is associated with one or more side chains of the anionic polymer chain. In aspects, the charge can be associated with both the main anionic polymer chain & 1+ side chains.

[1340] In aspects, an anionic polymer serving to functionalize a PDA has a molecular weight of less than 20,000 kD, such as for example less than about 20,000 kD, less than about 18,000 kD, less than about 16,000 kD, less than about 14,000 kD, less than about 12,000 kD, or less than about 10,000 kD, such as for example less than approximately 8,000 kD, less than approximately 6,000 kD, less than approximately 4,000 kD, or for example even less, such as less than approximately 2,000 kD. In some aspects, any one or more side chains of the main anionic polymer chain has a molecular weight or degree of polymerization that is less than the main chain from which it extends.

[1341] In aspects, polyanion functionalizing agent(s) can include but may not be limited to polyacrylic acid (PAA); polyglutamic acid; anionic oligopeptide polymers, e.g., anionic oligopeptide polymers having molecular weights of less than or equal to 10,000 kD, such as for example less than about 9,000 kD, less than about 8,000 kD, less than about 7,000 kD, less than about 6,000 kD, or less than about 5,000 kD, such as for example less than approximately 4,000 kD, less than approximately 3,000 kD, or even approximately 2,000 kD or less); poly(aspartic acid); polyethyleneglycol-b-poly(aspartic acid) copolymer; polypropylacrylic acid; or any other similar or equivalent such polyanions sufficient to provide the desired delivery mechanism characteristics of the composition such as means of administration, dissolution time, or, e.g., characteristics such as composition stability.

[1342] In aspects, PDAs are functionalized with lipid(s). In aspects, such lipid(s) DOS aids in the ability of NAM(s) to adhere to PDA(s) (e.g., maintain attachment with or remain bonded to a nanoparticle) until such time that it is appropriate for the compositions of the present invention to be digested, removed, or otherwise disengaged from, the nanoparticle. The lipid used to functionalize the nanoparticles can be any suitable biologically compatible lipid capable of providing a desired level of adherence of the compositional elements of the compositions described herein and the delivery mechanism.

### Charge and Zeta Potential Characteristics

[1343] PDAs/CEPESCs can have any suitable charge characteristics. In aspects, the amount of charge associated with PDAs/DAs/nanoparticles can be intentionally varied using known techniques in the art. Such an amount of charge can be any suitable amount of charge so as to yield nanoparticles having a desired amount of binding ability to an associated active, a desired amount of agglomeration (or lack thereof), or both a target level of binding ability & agglomeration. In aspects, polycations or polyanions can be prepared with a charge on 1-99% of the repeating units of a PDA polymer, such as for example between about 1-90%, between about 1-80%, between about 1-70%, between about 1-60%, between about 1-50%, between about 1-40%, between about 1-30%, between about 1-20%, or between about 1-10%, such as e.g., between about 10-99%, between about 20-99%, between about 30-99%, between about 40-99%, between about 50-99%, between about 60-99%, between about 70-99%, between about 80-99%, or for example between about 9-99% of the repeating units of the polymer carrying a charge, as in for example between approximately 20-80%, between approximately 30-70%, or between approximately 40-60% of repeating polymer units carrying a charge.

[1344] In aspects, a PDA(s)/CEPESCs comprise a zeta potential of between about −50 to about 50 millivolts, such as for example between about −70 to about 70 millivolts, between about −70 to about 60 millivolts, between about −70 to about 50 millivolts, between about −70 to about 40 millivolts, between about −70 to about 30 millivolts, between about −70 to about 20 millivolts, between about −70 to about 10 millivolts, or for example between about −70 to about 0 millivolts, e.g., between approximately −60 to about 70 millivolts, between approximately −50 to about 70 millivolts, between approximately −40 to about 70 millivolts, between approximately −30 to about 70 millivolts, between approximately −20 to about 70 millivolts, between approximately −10 to about 70 millivolts, or between for example between approximately 0-70 millivolts, as in for example between about −60 to about 60 millivolts, between about −50 to about 50 millivolts, between about −40 to about 40 millivolts, between about −30 to about 30 millivolts, between about −20 to about 20 millivolts, or for example between about −10 to about 10 millivolts.

### 2. Formulations

[1345] CEPESCs typically contain excipient(s) in addition to NAM(s), and any present additional vector component(s) (e.g., cellular vectors) or DA(s)/TFA(s). “Excipients” here means any intended, pharmaceutically acceptable component of a CEPESC that is not (1) any NAM(s) comprising EPES(s), (2) an active pharmaceutical ingredient (API); (3) a part of a vector; (4) a DA/TFA; and (5) an adjuvant (a substance that induces non-Ag specific IR(s) or that generally enhances IR(s)).

[1346] Excipients can either be classified as functional excipients, which impart/exert detectable and specific functions to/on the CEPESC (e.g., preservative, stabilizer, antioxidant, surfactant, chelating agent, isotonicifier, anesthetic, or buffer) and nonfunctional excipients, that are inert carriers or bulking agents (e.g., materials classified as diluents, carriers, and the like, such as water, solutions, etc.). Excipients are present in suitable and effective amounts. Effective amounts WRT functional excipients means an amount that suitably or optimally performs the intended function in the CEPESC (e.g., achieving a pH that is optimal for injection of the CEPESC into TR(s) and subsequent delivery of the CEPESCs to cells). Excipients and other components of CEPESCs typically are compatible with the other ingredients of the formulation, and not injurious to the subject (e.g., not associated with DOS adverse event(s) in TR population(s), e.g., as determined in clinical studies). Excipients and other component(s) DOS do not reduce the storage of the CEPESC under intended storage conditions, such as those DEH, and in storage and formulation steps (if any). CEPESCs can be in ready-for-use (RFU) form or a form that requires step(s) to prepare a RFU CEPESC (such AOTI are DEH). Excipients and other components of CEPESCs are typically adapted for and suitable for use in the intended delivery route of the CEPESC (e.g., by injection, such as subcutaneous injection, intradermal injection, or intramuscular injection; by mucosal delivery; by inhalation; by biolistic injection; or by oral administration). E.g., biolistic delivery systems comprising PDAs are described in, e.g., WO 99/2796, WO 99/08689, WO 99/04009, and WO 98/10750, and U.S. Pat. Nos. 5,525,510, 5,630,796, 5,865,796, 6,010,478, 4,945,050; 5,036,006; 5,100,792; and 5,179,022; 5,371,015; and 5,478,744 & related needle-less injection systems (Davis, H. L., et al, Vaccine 12:1503-1509, 1994).

[1347] Transfection facilitating agents/compounds suitable in formulations include inorganic materials such as calcium phosphate, alum (aluminum sulfate), and gold particles (e.g., “powder” type delivery vehicles); peptides that are, for example, cationic, intercell targeting (for selective delivery to certain cell types), intracell targeting (for nuclear localization or endosomal escape), and ampipathic (helix forming or pore forming); proteins that are, for example, basic (e.g., positively charged) such as histones, targeting (e.g., asialoprotein), viral (e.g., Sendai virus coat protein), and pore-forming; lipids that are, for example, cationic (e.g., DMRIE, DOSPA, DC-Chol), basic (e.g., steryl amine), neutral (e.g., cholesterol), anionic (e.g., phosphatidyl serine), and zwitterionic (e.g., DOPE, DOPC); and polymers such as dendrimers, star-polymers, “homogenous” poly-amino acids (e.g., poly-lysine, poly-arginine), “heterogeneous” poly-amino acids (e.g., mixtures of lysine & glycine), co-polymers, polyvinylpyrrolidinone (PVP), poloxamers (e.g. CRL 1005) and polyethylene glycol (PEG). A transfection facilitating material can be used alone or in combination with one or more other transfection facilitating materials. Two or more transfection facilitating materials can be combined by chemical bonds (e.g., covalent and ionic such as in lipidated polylysine, PEGylated polylysine) (Toncheva, et al, Biochim. Biophys. Acta 1380(3):354-368 (1988)), mechanical mixing (e.g., free moving materials in liquid or solid phase such as “polylysine+cationic lipids”) (Gao and Huang, Biochemistry 35:1027-1036 (1996); Trubetskoy, et al., Biochem. Biophys. Acta 1131:311-313 (1992)), and aggregation (e.g., co-precipitation, gel forming such as in cationic lipids+poly-lactide, and polylysine+gelatin).

[1348] In aspects, CEPESC(s) comprise excipient(s), PDA(s), or both that provide modified release characteristics, such as delayed release, sustained release, or both. In aspects, CEPESC(s) lack any delayed release characteristic(s)/component(s). NAM(s) of CEPESC(s) typically are isolated, except for any intended conjugated or otherwise associated PDA(s), prior to formulation with excipient(s) in the CEPESC. Carriers for injection include water for injection, PBS, aqueous dextrose solutions, glycerol solutions, and other suitable sterile solution(s). Excipients typically are metabolized by TR(s) rapidly without DOS lasting presence or physiological effect(s) in TR(s). CEPESCs can be in any suitable form, such as solutions, suspensions, gels, emulsions, or dry particle compositions. Formulations for injection typically exhibit pH and isotonicity/buffering characteristics that do not result in DOS AEs when delivered. Excipients and other components of CEPESCs typically can be characterized as being sterile, pyrogen free and particulate free. In aspects, CEPESCs are isotonic (e.g., an isotonic solution) or comprise agents that DOS enhance isotonicity (e.g., sodium chloride, dextrose, mannitol, sorbitol, PBS or lactose). Buffers that can be in CEPESCs include PBS, saline, Tris buffer(s), and sodium phosphate (e.g., about 150 mM sodium phosphate). In aspects, CEPECs comprise vasoconstriction agent(s). CEPESCs can comprise stabilizer(s), e.g., gelatin or albumin. In aspects, stabilizers DOS promote stability of the CEPESC, e.g., at RT or ambient temperature(s)/humidity for extended periods of time (e.g., 6-60 months, 12-48 months, or 18-36 months). Examples of such stabilizers include LGS, polycations, and polyanions. In aspects, such materials in PDA(s) also or alternatively afford such properties. Excipients and other components of CEPESC(s) typically do not DOS inhibit the ability of the NAM(s) to express EP(s) and for the EP(s) and components of NAM(s) to induce IR(s) or CE(s). Excipient(s) and other component(s) typically are characterizable as non-toxic, non-carcinogenic, non-teratogenic, non-genotoxic, or non-immunogenic and non-antigenic (except for CCCs, PDAs, etc., which are intended to exhibit adjuvant or other IR-inducing properties, such as vaccines and immunogenic therapeutic CCCs) Excipients and other components typically do not produce DOS AEs, e.g., allergic or similar untoward reaction, such as gastric upset, dizziness and the like, when administered. CEPESCs desirably retain such characteristics even when the same type or similar type of CEPESCs are administered two, three, or more times to a TR. Aspects of formulations adaptable to CEPESCs are described in, e.g., Ansel et al., PHARMACEUTICAL DOSAGE FORMS & DRUG DELIVERY SYSTEMS (e.g., 7th ed. 2000), Martindale, THE EXTRA PHARMACOPEIA (31st edition), Remington's PHARMACEUTICAL SCIENCES (e.g., 16th-20fh editions), THE PHARMACOLOGICAL BASIS OF THERAPEUTICS, Goodman and Gilman, Eds. (e.g., 9th ed.—1996), Pashine et al. 2005, Nature Med. 11(4):S63-S68, and U.S. Pat. Nos. 5,708,025, 5,994,106, 6,165,779, 6,225,289, 5,591,601, 5,593,972, 5,679,647, 5,697,901, 5,698,436, 5,739,118, 5,770,580, 5,792,751, 5,804,566, 5,811,406, 5,817,637, 5,830,876, 5,830,877, 5,846,949, 5,849,719, 5,880,103, 5,922,687, 5,981,505, 6,087,341, 6,107,095, and 6,110,898, and WO 98/06863, WO 98/55495, and WO 99/57275. Compositions and methods related to lipofection, nucleofection, biolistics, virosomes, liposomes, immunoliposomes, polycation or lipid:nucleic acid conjugates, artificial virions, cationic or neutral lipids, and agent-enhanced uptake of NAMs adaptable to CEPESC formulations are described in e.g., U.S. Pat. Nos. 5,049,386, 4,946,787; and 4,897,355, WO 91/17424; WO 91/16024. More auxiliary agents for use in compositions of the present invention include non-ionic detergents and surfactants (e.g., Tween, Pluronic, and similar compositions), various salts, excipients, delivery vehicles and/or other auxiliary agents as are disclosed, e.g., in U.S. patent application Publication No. 2002/0019358 and U.S. Pat. No. 8,821,890.

### 3. Packaged Compositions & “Kits”

[1349] Packaged compositions comprising CEPESCs (e.g., CEPESCs in containers, such as injection-ready vials and the like) are AOTI. Kits comprising CEPESCs or components of CEPESCs that can be constituted/reconstituted (“reconstituted”), formulated, combined, mixed, or prepared to obtain CEPESCs or RFU CEPESCs also are an AOTI. As such AOTIs share related properties they are discussed together here. As aspects of kits & packaged compositions applicable to NAM compositions are known in the art this description of such AOTIs is both brief & non-limiting WRT to what is KITA.

[1350] “Kits” can comprise any suitable combination of CEPESC components, such as NAM(s), separate NAM compositions for combination, PDA(s) that an be mixed with/reacted with NAM(s), excipients, CCC(s), or combinations. Kits can include instructions, labeling, etc. Kits can also include indicators of purity, stability, etc., and assay(s) for demonstrating potency, purity, or effectiveness (e.g., ELISA components, instructions for performing FACS, qPCR components, etc.). Kits can include indicator(s) of identity, such as RFID tags, and the like. Kits also can include containers for storing kit component(s), mixtures made in processing/making CEPESC(s), and the like. Components can be in dried or liquid form (e.g., NAM(s) can be present in lyophilized, spray dried, or other dried forms, which are an AOTI). Containers can include sealed containers such as ampule or sachet indicating the quantity of component(s) (e.g., water for injection, buffers, and the like). In aspects, kit(s) or packaged composition(s) comprise two or more different types of NAM(s) or two or more different types of CEPESC(s) (e.g., a NAV CEPESC and a viral vector CEPESC or a CEPESC intended for priming IR(s) and a second CEPESC intended for boosting IR(s)). Kit(s) and packaged composition(s) can comprise single-use component(s), reusable component(s), or both. Kit(s) can include and packaged composition(s) can include delivery system component(s)/device(s), e.g., bottles, test tubes, vials, iv bags, pierceable vials, syringes, needles, dispensing pens, biolistic system(s), and the like, or systems for promoting delivery such as for performing electrophoresis. Kits and packaged compositions(s) can include materials used in administration such as alcohol or other wipes, bandages, labels, anesthetics, and the like. E.g., a CEPESC for intramuscular injection can be contained in a kit or packaged composition comprising a standard needle (e.g., a needle with an inner diameter of less than 350 nm, such as a needle with a Birmingham gauge size of 23 or higher, e.g., a 23-34 gauge needle) In aspects, kits comprising such needle(s), vials (containing CEPESC formulations or ready to receive such formulations upon reconstitution of a dried CEPESC formulation so as to make a RFU formulation), and other components are provided. Other kits or packaged compositions can comprise other device(s)/component(s) to aid in any of the various delivery methods DEH, such as electroporation device(s), iontophoresis device(s), biolistic delivery device(s), device(s) for mucosal delivery, needle free injection devices (SFE U.S. Pat. Nos. 5,702,359, 7,245,963, 7,328,064, & 6,763,264), and the like. Kits and packaged compositions can comprise CEPESCs in unit dosages for delivery (e.g., 2, 3, 4, or more dosage(s) for individual TRs, or 50, 100, 150, 200, 250, 500, or more dosage units for delivery to a population, e.g., a herd of swine, cows, or other livestock NHA(s).

### E. Cells and Cellular Production of NAMs

[1351] Cells comprising EPES/CEPES NAM(s) reflect another AOTI as are methods of producing such NAM(s) in suitable host cell(s). In aspects, cells comprising EPES/CEPES NAM(s) are eukaryotic cells (cells comprising such NAM(s) can be referred to as “host cells”). In aspects, such cells are fungal cells, e.g., yeast cells (e.g., S. cerevisiae cells, N. crassa, P. pastoris cells, or H. polymorpha yeast) or mammalian cells. In aspects, host cells are insect cells such as Drosophila and Spodopterafrugiperda cells. In aspects, host cells are prokaryotic cells, such as E. coli cells. In aspects, host cells are plant cells. In aspects, host cells are mammalian cells such as COS cells, Chinese hamster ovary (CHO) cells, Vero cells, or cells of well-known mammalian cell line origins such as HeLa, BHK, MDCK, HEK 293, K8 cells, SW-13 cells, MCF7 cells, CV1/EBNA cells, PERC6 cells, NTH-3T3 cells, MRC-5 fibroblast cells, and WI38 cells. Examples of host cell systems adaptable to such AOTI are described in, e.g., U.S. Pat. No. 5,994,106 and WO 95/34671 and Pouwels et al. CLONING VECTORS: A LABORATORY MANUAL, Elsevier, N.Y., (1985) and Kaufman, R. J., LARGE SCALE MAMMALIAN CELL CULTURE, 1990, e.g., pp. 15-69). Any such cells can be transfected with NAM(s) and used to reproduce NAM(s), e.g., NAVs comprising EPES(s). In aspects, host cells can stably maintain NAM(s) for, e.g., at least about 10, 15, 20, 30, 50, 100, 200, or 500 generations. In aspects, the invention provides a recombinant non-human animal or plant comprising EPES NAM(s). In aspects, such a non-human animal or plant is used to produce the CEPESC NAM(S) of a CEPESC of the invention.

### F. Polypeptide EPs & PEP Compositions

[1352] PPTs expressed from CEPESCs, compositions comprising such PPTs, and the use of such PPTs or compositions, also reflect AOTI. Although not typically expected to be the case in some aspects, the use of a PPT composition expressed from any of the CEPESCs disclosed herein can be preferred to the delivery of CEPESCs comprising EPES NAM(s). In one such aspect, a CEPESC EP PPT is derivatized prior to use (such PPT “derivatives” are briefly discussed below). EP PPTs can be expressed in host cells, purified according to standard methods known in the art (SFE PROTEIN PURIFICATION APPLICATIONS: A PRACTICAL APPROACH (E. L. V. Harris and S. Angal, Eds., 1990)), and either delivered TR(s) in effective amount(s) or formulated in suitable formulations and delivered to TR(s) in effective amounts. Such compositions can comprise any suitable amount and number of such EP PPT(s). PPT vaccine formulations & biotherapeutic formulations are KITA, discussed in references CEH, and such principles, methods, and compositions can be adapted to EP PPT compositions.

[1353] A PPT “derivative,” which will be understood as a biomolecule modified by chemical modification, such as replacement with a synthetic amino acid or conjugated amino acid, as is described above. Covalent derivatives may be prepared using methods known in the art by, e.g., linking the chemical moieties to functional groups on amino acid side chains or at the N-terminus or C-terminus of a polypeptide. However, in most aspects of the invention it is expected that the polypeptides encoded by the constructs of the invention will be non-derivatized (i.e., not modified by chemical methods apply by human intervention). Thus, outside of any AOTI that relate to polypeptides provided herein, per se, or use of such polypeptides or compositions comprising such polypeptides, derivatives will not be considered to be encompassed within the disclosure of a polypeptide or amino acid sequence. EP PPTs also can include post-translational modification(s) added by operations of COE(s), such as glycosyl groups, lipids, phosphate, acetyl groups, and the like.

### G. Combination Products

[1354] In aspects, CEPESCs comprise additional API(s), adjuvant(s), or both. Such CEPESCs can be characterized as combination compositions (CCs) and such additional components can be characterized as CC components (CCCs). Numerous examples of CCCs are DEH. In general, CEPESNAM(s), DA/PDA(s) if present, and excipient(s) if present, can be combined with any suitable number of CCCs, of any suitable type of composition, and such CCCs can be present in any suitable amount(s) in such compositions. In aspects, a composition is intended for prevention or treatment of cancer and CCCs comprise anti-cancer therapeutics, anti-cancer prophylactic agents/vaccines, or both. Numerous examples of such compounds are known and examples are briefly described below. In aspects, a composition is intended for prevention or treatment of a pathogenic DCA, such as a virus. Examples of suitable CCCs for such AOTI also are well known and briefly DEH.

[1355] In AOTI, CCCs comprise cells, such as APCs (e.g., DCs), CAR-T cells, or other cellular or cell-derived compositions. Such uses of APCs are described in Martin-Fontecha et al. 2003 J. Exp. Med. 198, 615-621. In aspects, CCCs comprise killed cells or sera, e.g., killed cancer cells. In aspects, CCCs comprise autologous cells, such as autologous APCs (e.g., cancer PPT Ag loaded or pulsed with CAg(s), e.g., DCs pulsed with CAg(s), such as MART-127-35 or MART-1. In AOTI, CCCs/AACs comprise PPT or non-PPT/non-NS CIs, e.g., an anti-PD-1, anti-CTLA4, anti-KIR, anti-CRACC, or anti-PD-L1 Ab, as DEH.

[1356] In AOTI, CEPESCs are intended for treatment or prevention of cancer and CCCs comprise chemotherapeutic agent(s) (e.g., carboplatin or paclitaxel), anti-cancer vaccine(s) (including vectors encoding CAg(s)), anti-angiogenesis agents, cytokine(s), checkpoint inhibitors, and the like. Numerous examples of suitable anti-cancer CCCs/AACs are known and are DEH or described in references CEH.

[1357] In AOTI, CCCs comprise IMs, such as cytokine(s), or NAMs or vectors encoding CIs. Numerous examples of such possible CCCs are DEH.

[1358] In aspects, CCCs comprise nucleic acid molecules, such as vectors, encoding sequences that downregulate the expression of DCA-causing or DCA-promoting agents (e.g., genes that downregulate TR oncogenes, endogenous inhibitory CIs, and the like).

[1359] In AOTI, a CEPESC is intended for prevention/treatment of a pathogenic DCA and CCCs comprise antibiotic, antiviral, antiprotozoal, antifungal, or antihelminthic compound(s).

[1360] E.g., anti-hepatitis CCCs/AACs can comprise interferon, adefovir dipivoxil, and lamivudine. acyclovir, famciclovir, or ganciclovir. Additional anti-viral agents that can be CCCs/AACs include, but are not limited to, abacavir (ZIAGEN®), abacavir/lamivudine/zidovudine (Trizivir®), aciclovir or acyclovir (CYCLOVIR®, HERPEX®, ACIVIR®, ACIVIRAX®, ZOVIRAX®, ZOVIR®), adefovir (Preveon®, Hepsera), amantadine (SYMMETREL®), amprenavir (AGENERASE®), ampligen, arbidol, atazanavir (REYATAZ®), boceprevir, cidofovir, darunavir (PREZISTA®), delavirdine (RESCRIPTOR®), didanosine (VIDEX®), docosanol (ABREVA®), edoxudine, efavirenz (SUSTIVA®, STOCRIN®), emtricitabine (EMTRIVA®), emtricitabine/tenofovir/efavirenz (ATRIPLA®), enfuvirtide (FUZEON®), entecavir (BARACLUDE®, ENNAVIR®), famciclovir (FAMVIR®), fomivirsen (VITRAVENE®), fosamprenavir (LEXIVA®, TELZIR®), foscarnet (FOSCAVIR®), fosfonet, ganciclovir (CYTOVENE®, CYMEVENE®, VITRASERT®), GS 9137 (ELVITEGRAVIR®), imiquimod (ALDARA®, ZYCLARA®, BESELNA®), indinavir (CRIXIVAN®), inosine, inosine pranobex (IMUNOVIR®), interferon type I, interferon type II, interferon type III, kutapressin (NEXAVIR®), lamivudine (ZEFFIX®, HEPTOVIR®, EPIVIR®), lamivudine/zidovudine (COMBIVIR®), lopinavir, loviride, maraviroc (SELZENTRY®, CELSENTRI), methisazone, MK-2048, moroxydine, nelfinavir (VIRACEPT®), nevirapine (VIRAMUNE®), oseltamivir (TAMIFLU®), peginterferon alfa-2a (PEGASYS®), penciclovir (DENAVIR®), peramivir, pleconaril, podophyllotoxin (CONDYLOX®), raltegravir (ISENTRESS®), ribavirin (COPEGUs®, REBETOL®, RIBASPHERE®, VILONA® AND VIRAZOLE®), rimantadine (FLUMADINE), ritonavir (NORVIR®), pyramidine, saquinavir (INVIRASE®, FORTOVASE®), stavudine, tea tree oil (melaleuca oil), tenofovir (VIREAD®), tenofovir/emtricitabine (TRUVADA®), tipranavir (APTIVUS®), trifluridine (VIROPTIC®), tromantadine (VIRU-MERZ®), valaciclovir (VALTREX®), valganciclovir (VALCYTE®), vicriviroc, vidarabine, viramidine, zalcitabine, zanamivir (RELENZA®), and zidovudine (azidothymidine (AZT), RETROVIR®, RETROVIS®).

[1361] Exemplary anti-fungal agents, anti-bacterial agents, anti-protozoan agents, anti-parasitic agents, that can be incorporated as CCCs/AACs are described in similar levels of detail in, e.g., US20170065675 and U.S. Pat. No. 9,676,856.

[1362] In aspects, CCCs/AACs comprise immunomodulators, such as non-peptidic IMs, e.g., synthetic imidazoquinolines such as imiquimod and resiquimod; schiff bases of carbonyls and amines that are constitutively expressed on antigen presenting cell and T-cell surfaces, such as tucaresol (Rhodes, J. et al. ‘Therapeutic potentiation of the immune system by costimulatory Schiff-base-forming drugs’, Nature 377: 71-75 (1995)), synthetic lipid based adjuvants, such as vaxfectin, (Reyes et al., ‘Vaccine 19: 3778-3786), squalene, alpha-tocopherol, endotoxin, [LPS], Beutler, B., ‘Endotoxin, ‘Toll-like receptor 4, and the afferent limb of innate immunity’, Current Opinion in Microbiology 3: 23-30 (2000)); CpG oligo- and di-nucleotides (SFE Sato, Y. et al., Science 273 (5273): 352-354 (1996); and TLR(s)/TLR ligand(s) (SFE Hemmi, H. et al., Nature 408: 740-745, (2000)).

[1363] In aspects, CCCs or AACs comprise one or more vaccines, e.g., PPT vaccines, inactivated virus vaccines, partial virus vaccines, or DNA vaccines, which are AAW CEPESCs. Vaccines are known in the art and described in several references CEH. In general, a “vaccine” refers to a composition, for example, a substance or preparation that stimulates, induces, causes or improves immunity in an organism, and typically provides immunity against one or more diseases or disorders in the organism, including prophylactic and/or therapeutic immunity. Exemplary anti-pathogen vaccines includes one or more agents that resembles an infectious agent, e.g., a disease-causing microorganism, and can be made, for example, from live, attenuated, modified, weakened or killed forms of disease-causing microorganisms, or antigens derived therefrom, including combinations of antigenic components. In exemplary embodiments, a vaccine stimulates, induces causes or improves immunity in an organism or causes or mimics infection in the organism without inducing any disease or disorder. A vaccine introduces an antigen into the tissues, extracellular space or cells of a subject and elicits an immune response, thereby protecting the subject from a particular disease or pathogen infection. Nucleic acid vaccines can encode antigen(s) and when the polynucleotides are expressed in cells, a desired IR is obtained.

[1364] In aspects, CCCs induce a predominantly or generally only Th1-type response include, for example, a Lipid A derivative such as monophosphoryl lipid A, or 3-de-O-acylated monophosphoryl lipid A (SFE U.S. Pat. Nos. 4,436,727; 4,877,611; 4,866,034 and 4,912,094), CpG-containing oligonucleotides (SFE WO 96/02555, WO 99/33488 and U.S. Pat. Nos. 6,008,200 and 5,856,462), a saponin, such as Quil A, or derivatives thereof, including QS21 and QS7 (Aquila Biopharmaceuticals Inc., Framingham, Mass.); Escin; Digitonin; or Gypsophila or Chenopodium quinoa saponins.

### 1. Adjuvant CCCs/AACs

[1365] In aspects, CCCs/AACs are adjuvant(s). Adjuvant(s) induce non-Ag-specific IR(s) or enhance other IR(s) in TR(s). Numerous examples of adjuvants are DEH and the category overlaps with many other categories of compositions discussed under other headings in this disclosure. CEPESCs can comprise or be administered with any suitable number, type, and amount of adjuvant(s). Generally, adjuvant(s) can be any composition that DOS increases the expression of EPs or enhances the antigenicity or immunogenicity of Ag(s) and IM(s). Potential adjuvants may be screened for ability to enhance IR(s).

[1366] Aduvants may be selected from any of the classes (1) mineral salts, e.g., aluminium hydroxide and aluminium or calcium phosphate gels; (2) emulsions including: oil emulsions and surfactant based formulations, e.g., microfluidised detergent stabilised oil-in-water emulsion, purified saponin, oil-in-water emulsion, stabilised water-in-oil emulsion; (3) particulate adjuvants, e.g., virosomes (unilamellar liposomal vehicles incorporating influenza haemagglutinin), structured complex of saponins and lipids, polylactide co-glycolide (PLG); (4) microbial derivatives; (5) endogenous human immunomodulators; and/or (6) inert vehicles, such as gold particles; (7) microorganism derived adjuvants; (8) tensoactive compunds; (9) carbohydrates; or combinations thereof. Cytokine(s) can exhibit adjuvant activity and be considered adjuvants. Other CCCs DEH that can be considered adjuvants include, ligands or stimulants of Toll Like Receptors (TLR) 1,2,3,4,5,6,7,9,10, or signaling molecules (e.g., NF-Kappa B subunit p65/Rel A, or Type-1 Transactivator T bet).

[1367] In AOTI, adjuvants are selected from inert carriers (such as alum, bentonite, latex, and acrylic particles); pluronic block polymers (such as TiterMax® (block copolymer CRL-8941), squalene (a metabolizable oil) and a microparticulate silica stabilizer)); depot forming agent(s) (such as Freunds adjuvant); surface active materials (such as saponin, lysolecithin, retinal, Quil A, liposomes, & pluronic polymer formulations); macrophage stimulators (e.g., bacterial lipopolysaccharide); alternate pathway complement activators (such as insulin, zymosan, endotoxin, & levamisole); and non-ionic surfactants (such as poloxamers, poly(oxyethylene)-poly(oxypropylene) tri-block copolymers).

[1368] Adjuvants for DNA nucleic acid vaccines that can be applied to similar AOTI have been disclosed in, for example, Kobiyama, et al Vaccines, 2013, 1(3), 278-292. Adjuvants for RNA NAVs are described in, e.g., the web-based vaccine adjuvant database, Vaxjo; http://www.violinet.org/vaxjo/ and Sayers, et al., J. Biomedicine and Biotechnology, volume 2012 (2012), Article ID 831486. An extensive disclosure of adjuvants that can be adapted to AOTI are provided in, e.g., US20190167774. Adjuvants can include inorganic adjuvants (e.g. inorganic metal salts such as aluminium phosphate or aluminium hydroxide), organic adjuvants (e.g. saponins or squalene), oil-based adjuvants (e.g. Freund's complete adjuvant and Freund's incomplete adjuvant), cytokines, particulate adjuvants (e g immuno-stimulatory complexes (ISCOMS), liposomes, or biodegradable microspheres), virosomes, bacterial adjuvants (e.g. monophosphoryl lipid A, or muramyl peptides), synthetic adjuvants (e.g. non-ionic block copolymers, muramyl peptide analogues, or synthetic lipid A), or synthetic polynucleotides adjuvants (e.g polyarginine or polylysine). Such compositions are known in the art. E.g., ISCOMs are described in Hu K F et al. Adv Drug Deliv Rev. 2001; 51(1-3):149-159. doi:10.1016/s0169-409x(01)00165-x; Morein B et al. Methods. 1999; 19(1):94-102. doi:10.1006/meth.1999.0833; and WO200408494. Additional adjuvants are described in, e.g., Shah R R et al. Methods Mol Biol. 2017; 1494:1-13. doi:10.1007/978-1-4939-6445-1_1. An extensive disclosure of many types of adjuvants that can be adapted to AOTI, such as polymeric adjuvants, cytokines, and the like, is provided in EP1572941. Further possibly suitable adjuvants include, protamine, poly I:C RNA, invariant chain/LAMP-1, GM-CSF and Co-stimulatory molecules like CD40, the RIBI adjuvant system (Ribi Inc.), Block co-polymer (CytRx, Atlanta Ga.), SAF-M (Chiron, Emeryville Calif.), monophosphoryl lipid A, Avridine lipid-amine adjuvant, heat-labile enterotoxin from E. coli (recombinant or otherwise), cholera toxin, IMS 1314, muramyl dipeptide, and the SPT emulsion or MF59 emulsion (SFE “Vaccine Design, The Subunit and Adjuvant Approach” edited by M. Powell and M. Newman, Plenum Press, 1995). Additional adjuvants and aspects of those DEH are described in Hunter et al., THE THEORY AND PRACTICAL APPLICATION OF ADJUVANTS (Ed. Stewart-Tull, D. E. S.). JohnWiley and Sons, NY, pp 51-94 (1995) and Todd et al., Vaccine 15:564-570 (1997). In aspects, NAM(s)/NAV(s) are immunogenic in TRs, even independent of expression of EP(s) or EPES NAM(s)/NAV(s) are administered with other nucleic acids that exhibit immunogenic properties. E.g., adjuvant(s) can comprise unmethylated CpG-dinucleotides (SFE U.S. Pat. Nos. 6,207,646, 6,406,705 and 6,429,199 and are also DEH. Additional nucleotide adjuvants are described in Wagner et al. (2000) Springer Semin Immunopathol 22(1-2): 147-52, Van Uden et al. (2000) Springer Semin Immunopathol 22(1-2): 1-9, and Pisetsky (1999) Immunol Res 19(1):35-46, as well as U.S. Pat. Nos. 6,194,388, 6,008,200, 6,239,116, and 6,218,371. mRNA NAVs typically possess self-adjuvating properties. mRNAs encoding adjuvants also can enhance IR(s), such as GM-CSF mRNA and CD40 mRNA. Nucleic acids can also be administered in dosage(s) large enough to be immunogenic (SFE WO2012006372, WO2012006369, USS20130149375 & US20130177640). Thus, while in some aspects CEPESCs are described as non-immunogenic in other AOTI such compositions are immunogenic independent of EP expression.

[1369] The ability of an adjuvant to increase IR(s) is typically manifested by a significant increase in immune-mediated protection, e.g., an increase in humoral immunity is typically manifested by a significant increase in the titer of antibodies raised to Ag(s), and an increase in T-cell activity is typically manifested in increased cell proliferation, or cellular cytotoxicity, or cytokine secretion. An adjuvant may also alter IR(s), for example, by changing a primarily humoral or Th2 response into a primarily cellular, or Th1 response. In aspects, adjuvant(s) exhibit DOS IR(s) in ICs, such as ITICs. E.g., poly I:C adjuvants can DOS enhance DC proliferation and activation. TLR or NLR ligands can enhance IC-mediated IR(s). ICR(s) associated with dead cells or ligands thereof also can be used as adjuvant(s) (e.g., CD36, integrin, PtdSerR, or CLEC9A) as can other “dead cell markers,” or “eat me signals,” e.g., phosphatidylserine (PS) or actin filaments. In aspects, adjuvant(s) comprising TLR ligand(s), such as LPS, CpG, poly I:C DOS inhibit cross-presentation, DOS inhibit tolerance, or DOS otherwise enhance IR(s). In aspects, adjuvant(s) comprise aptamers or siRNA molecules (e.g., siRNAs targeting PD-L1). Additional adjuvant(s) include other ligands for DC ICR(s), such as beta glucan, lipoglycans and other lipocarbohydrates, and carbohydrate recognized by DCRs.

### II. Methods of Use

[1370] As DEH, AOTI include methods of using CEPESCs and other compositions DEH to induce IR(s) or CE(s) and, in AOTI, prevent or treat diseases associated with DCAs in TR(s), e.g., pathogen infections or cancers.

[1371] Methods of the invention can be applied to any type of TR, including human patients and non-human subjects, such as swine, cows, dogs, cats, chickens, horses, and the like (e.g., companion animals and livestock animals).

[1372] In aspects, CEPESCs are used as therapeutic or prophylactic agents. In aspects, CEPESCs are delivered one or more times to TR(s). In aspects, CEPESC(s) are used to stimulate cells and the cells are infused into TR(s).

### A. Delivery Characteristics (Dosing Strategies Target Tissues, Etc.)

[1373] CEPESCs can be delivered/administered to TRs by any suitable technique(s), into any suitable tissue(s), any suitable number of time(s), and in any suitable amount(s). In aspects, CEPESCs are delivered in a single dose, in several divided dosages, or staggered dosages. In aspects, CEPESCs are administered daily or sequentially. In aspects, CEPESCs are continuously infused. In aspects, CEPESCs are delivered via bolus injection. CEPESC dosages may be proportionally increased or decreased based on clinical conditions or CEs. Different CEPESCs, CCCs, dosage amounts, number of dosages, etc., can be applied also based on CEs, AEs (e.g., cytokine syndrome effects), and the like.

[1374] In aspects, CEPESCs are delivered to TRs by intramuscular, subcutaneous, intradermal, intravenous, inhalation, insufflation, oral, nasal, rectal, parenteral, sublingual, paracanceral, transdermal, transmucosal (e.g., (trans)buccal, (intra)nasal, and (trans)rectal), intravesical, intrapulmonary, intraventricular, intraduodenal, intra-tumoral, intragastrical, intrathecal, intra-arterial, or intrabronchial administration. In aspects, CEPESCs are delivered by mucosal administration. In aspects, CEPESCs are delivered by injection (e.g., i.m. or s.c. injection). In aspects, CEPESCs are delivered intradermally, e.g., by biolostic/gene gun delivery methods (SFE Haynes et al, J Biotechnology 44: 37-42 (1996) & U.S. Pat. Nos. 5,846,796; 6,010,478; 5,865,796; & 5,584,807).

[1375] In aspects, delivery of CEPESCs into target cell(s) is facilitated by application of electroporation methods (SFE Chicaybam et al., (2013) PLoS ONE 8(3): e60298; Van Tedeloo et al. (2000) Gene Therapy 7(16): 1431-1437); and Lambricht L, et al Expert Opin Drug Deliv. 2016; 13(5):769 and 2016; 13(2):295-310. doi:10.1517/17425247.2016.1121990). Other methods applicable to delivery of CEPESCs comprise protoplast fusion, cationic liposome-mediated transfection; tungsten particle-facilitated microparticle bombardment (Johnston, Nature, 346: 776-777 (1990)); and strontium phosphate DNA co-precipitation (Brash et al., Mol. Cell Biol., 7: 2031-2034 (1987)).

[1376] In certain embodiments, the compositions are administered to muscle, either skeletal muscle or cardiac muscle, or to lung tissue. Such methods are exemplified in, e.g., Wheeler, C. J., et al., Proc. Natl. Acad. Sci. USA 93:11454-11459 (1996).

[1377] According to the disclosed methods, compositions of the present invention can be administered by intramuscular (i.m.), intradermal (i.d.), subcutaneous (s.c.), or intrapulmonary routes. Other suitable routes of administration include, but are not limited to intratracheal, transdermal, intraocular, intranasal, inhalation, intracavity, intravenous (i.v.), intraductal (e.g., into the pancreas) and intraparenchymal (i.e., into any tissue) administration. In aspects, CEPESCs are delivered via transdermal (e.g., percutaneous) and transmucosal administration (i.e., into or through skin or mucosal tissue). In aspects, CEPESCs are delivered by two or more methods (e.g., by i.m. or s.c. and mucosal delivery).

[1378] Delivery of NAMs to interstitial spaces of tissues of an individual is described in, e.g., Felgner et al., U.S. Pat. Nos. 5,580,859 and 5,703,055 and other references CEH. CEPESCs can be administered by methods well known in the art as described in Donnelly et al. (Ann. Rev. Immunol. 15:617-648 (1997)); Felgner et al. (U.S. Pat. No. 5,580,859, issued Dec. 3, 1996); Felgner (U.S. Pat. No. 5,703,055, issued Dec. 30, 1997); and Carson et al. (U.S. Pat. No. 5,679,647, issued Oct. 21, 1997). CEPESCs can be complexed to particles or beads (e.g., PDAs) that can be administered to an individual, for example, using a vaccine gun. CEPESCs can comprise formulation elements as DEH.

[1379] Administration means for CEPESCs can include needle injection, catheter infusion, biolistic injectors, particle accelerators (e.g., “gene guns” or pneumatic “needleless” injectors) Med-E-Jet (Vahlsing, H., et al., J. Immunol. Methods 171:11-22 (1994)), Pigjet (Schrijver, R., et al., Vaccine 15: 1908-1916 (1997)), Biojector (Davis, H., et al., Vaccine 12: 1503-1509 (1994); Gramzinski, R., et al., Mol. Med. 4: 109-118 (1998)), AdvantaJet (Linmayer, I., et al., Diabetes Care 9:294-297 (1986)), Medi-jector (Martins, J., and Roedl, E. J. Occup. Med. 21:821-824 (1979)), gelfoam sponge depots, other commercially available depot materials (e.g., hydrogels), osmotic pumps (e.g., Alza minipumps), or use of polynucleotide coated suture (Qin, Y., et al., Life Sciences 65: 2193-2203 (1999)). Certain modes of administration are intramuscular needle-based injection and pulmonary application via catheter infusion. Energy-assisted plasmid delivery (EAPD) methods may also be employed to administer the compositions of the invention. One such method involves the application of brief electrical pulses to injected tissues, a procedure commonly known as electroporation. See generally Mir, L. M. et al., Proc. Natl. Acad. Sci. USA 96:4262-7 (1999); Hartikka, J. et al., Mol. Ther. 4:407-15 (2001); Mathiesen, I., Gene Ther. 6:508-14 (1999); Rizzuto G. et al, Hum. Gen. Ther. 11:1891-900 (2000); and U.S. Pat. Nos. 7,664,545; 6,302,874; 5,676,646; 6,241,701; 6,233,482; 6,208,893; 6,192,270; & 5,702,359.

[1380] In aspects, CEPESCs can be delivered by transdermal administration (e.g., aided by iontophoresis, electroporation, or use of a PDA, such as a tat-conjugated dendrimer) (SFE Bahadoran A et al. J Pharm Pharm Sci. 2016; 19(3):325-338. doi:10.18433/J3G31Q; Cashman K A et al. Hum Vaccin Immunother. 2017; 13(12):2902-2911. doi:10.1080/21645515.2017.1356500) (iontophoresis and electroporation methods are known, SFE Banga A K et al. Int J Pharm. 1999; 179(1):1-19. doi:10.1016/s0378-5173(98)00360-3 and references CEH in connection with such methods). Epidermal administration of the vaccine can also be employed. Epidermal administration can involve mechanically or chemically irritating the outermost layer of epidermis to stimulate an immune response to the irritant (Carson et al., U.S. Pat. No. 5,679,647).

[1381] In aspects, CEPESCs are formulated for administration to mucosa, e.g., via the nasal passages. Formulations suitable for nasal administration, wherein a solid carrier, such as a PDA is used, can include a coarse powder having a particle size, for example, in the range of about 10 to about 500 microns which is administered in the manner in which snuff is taken, i.e., by rapid inhalation through the nasal passage from a container of the powder held close up to the nose. The formulation can be a nasal spray, nasal drops, or by aerosol administration by nebulizer. The formulation can include aqueous or oily solutions of the vaccine. In aspects, RFU CEPESCs take the form of a liquid preparation, such as a suspension, solution, syrup or elixir (e.g., for parenteral, intradermal, s.c., i.m., or intravenous administration (e.g., injectable administration), e.g., as a sterile suspension or emulsion.

[1382] In aspects, methods comprise administering a CEPESC to a TR one single time. In aspects, a CEPESC is administered to a TR at two different times or 2 different CEPESCs are administered on different times. In aspects, CEPESC(s) are administered three times (e.g., a single CEPESC is administered at 3 different times, 3 different CEPESCs are administered at different times, or methods comprise some mixture of repeat administration and administration of different CEPESC(s)). In aspects, CEPESCs are administered four times to TR(s). In aspects, CEPESC(s) are administered more than four times to TR(s). In aspects in which multiple administrations of CEPESC(s) are performed, such CEPESC(s) can be administered at regular intervals, e.g., daily, weekly, every two weeks, every three weeks, every month, every 2 months, every quarter, semi-annually, annually, etc. Each possibility represents a separate embodiment of the methods disclosed herein.

[1383] To exemplify, a dose of CEPESCs can be delivered to TR(s) every 1-2 weeks, every 2-3 weeks, every 3-4 weeks, every 4-5 weeks, every 6-7 weeks, every 7-8 weeks, every 9-10 weeks, or every 1-24, 1-18, 1-12, 1-9, 1-6, 1-4, 3-4, 4-5, 6-7, 7-8, 9-10, 1-3, 2-3, or 1-2 months in order to achieve the intended elicitation of IR(s)/CE(s).

[1384] In aspects, repeat administrations (booster doses) of CEPESCs are applied to TR(s) immediately following the first course of treatment or after an interval of days, weeks or months to induce intended IR(s)/CE(s).

[1385] In one embodiment, a subject is administered a booster dose every 1-2 weeks, every 2-3 weeks, every 3-4 weeks, every 4-5 weeks, every 6-7 weeks, every 7-8 weeks, or every 9-10 weeks in order to achieve the intended anti-tumor response. In one embodiment, a subject is administered a booster dose every 1-2 months, every 2-3 months, every 3-4 months, every 4-5 months, every 6-7 months, every 7-8 months, or every 9-10 months in order to achieve the intended elicitation of an immune response targeted at the subject's disease or condition. E.g., CEPESCs can be administered every 1, 2, 3,4,5,6,7,8,9,10,11,12,13,14,15,16,17,18,19,20,21,22,23,24, 25, 26, 27, 28, 29, 30, or 31 days, or 1-10, 2-10, 1-5, 2-4, 1-4, 1-3, or 2-3 times over a period of 2 years, 1.5 years, 12 months, 9 months, 6 months, or 3 months (such administrations separated by 0.5-24 months, e.g., 1-12 months, 1-6 months, or different periods falling within any such range). The number of total applications of CEPESC(s) in a method, such as a disease treatment method, can be, e.g., 1, 2, 3, 4, 5, 6, 7, 8, 9, or 10 times.

[1386] In aspects, delivery of multiple CEPESCs; multiple doses of CEPESCs, ≥2 CEPESC(s)+CCC(s); or application of AAC(s) and delivery of CESPESC(s) comprises step(s) of monitoring efficacy (e.g., against standard(s)), monitoring AE(s) (e.g., cytokine syndrome, immunogenic reactions, and the like), or both, and adjusting the timing of delivery, amount of delivery, frequency of delivery, dosage amount(s), or selecting second or more subsequent CCC/CEPESC to deliver or AAC to apply. E.g., In AOTI, methods comprise performing a method that DOS stimulates DCs, NKCs, or both, optionally with other ITICs or ICs in a population of TRs (e.g., as determined by clinical study or studies) in a TR and thereafter delivering CEPESC(s) to the TR. In one case, a composition comprising an effective amount of an EAT-2 PPT or EAT-2-ES NAM is delivered to a TR and after either a period of time that normally is sufficient for IC stimulation or after the detection of stimulation in the TR CEPESC(s) are administered (e.g., a CEPESC comprising gDAgFP(s)).

[1387] CEPESCs can be delivered in any suitable dosage(s) delivered any suitable number of time(s). In aspects, each dosage of CEPESC or NAM(s) in CEPESC ranges from ˜0.001 to 30 mg/kg TR body wt, about 0.01 to 25 mg/kg body weight, about 0.1 to 20 mg/kg body weight, or from about 1 to 10 mg/kg, 2 to 9 mg/kg, 3 to 8 mg/kg, 4 to 7 mg/kg, or 5 to 6 mg/kg body weight.

[1388] In multiple CEPESC methods or combination methods, CEPESCs or CEPESC(s) & CCC(s)/AAC(s) can be administered simultaneously, for example in a combined unit dose or separately in a specified time interval, e.g., in an interval of minutes, hours, days or weeks. Such agents may be administered in any order, or as 1+ preparations that includes 2+ agents. In aspects, at least one administration of one of the agents, e.g., a “first agent,” may be made within minutes, one, two, three, or four hours, or even within one or two days of the other agent, e.g., a “second agent.” In some embodiments, combinations can achieve synergistic results, e.g., greater than additive results, e.g., at least 25, 50, 75, 100, 200, 300, 400, or 500% greater than additive results.

[1389] In aspects, CEPESC(s) are delivered as part of a “prime boost” dosing/treatment regimen. An example of a “prime boost” regimen may be found in Yang, Z. et al., J. Virol. 77:799-803 (2002). The difference in time between the “prime” administration of a CEPESC or application/delivery of an AAC (e.g., a different immunogenic composition, such as those DEH), and the “boost” repeat/initial dosage of the CEPESC, a different CEPESC, or repeat or different application/dose of AAC can be, e.g., 1 week, 2 weeks, 4 weeks, 6 weeks or 8 weeks. More particularly, it is 4 weeks or 8 weeks.

[1390] In aspects, CEPESCs are delivered between 1 and 7 times, preferably between 1 and 4 times, at intervals between about 1 day and about 18 months. In aspects, multiple different CEPESCs or CEPESCs and AACs are administered/applied to TR(s). E.g., CEPESCs or CEPESC(s) and AAC(s) can be administered/applied 2-12, 2-10, 2-8, 2-6, 2-5, or 2-3 times to TR(s). Typically, CEPESC(s) are applied 2, 3, 4, or 5 times to TR(s). In aspects, AAC(s) and CEPESC(s) are administered/applied simultaneously, or substantially simultaneously (e.g., within the same 30 minutes, 20 minutes, 15 minutes, or 5 minutes). In aspects, AAC(s) and CEPESCs are administered/applied at different times, e.g., within 1-8 hours, 1-2 hours, 1-3 hours, or 1-4 hours, or are separated by 1-12 days, e.g., 1-8 days, 1-7 days, 1-5 days, 1-4 days, 1-3 days, or 1-2 days, and in aspects such administrations/applications or separated by 1-12 weeks, 1-10 weeks, 2-12 weeks, 2-8 weeks, 1-8 weeks, 1-6 weeks, 2-6 weeks, 3-12 weeks, 3-9 weeks, 4-12 weeks, 4-8 weeks, 1-4 weeks, or 2-4 weeks, or 2-18 months, 2-12 months, 2-8 months, 2-6 months, or 2-4 months, such as 3-15 months, 3-9 months, 3-6 months, 3-12 months, 4-12 months, 4-8 months, or 4-6 months.

### B. Target Recipients (TR(s)—Subjects)

[1391] Methods of the invention can be applied to any suitable individual target recipient (TR) (also sometimes referred to as “subjects”) or population of TR(s). TR(s) can be any vertebrate that is infectable by α-HVs. In aspects, TR(s) are mammals. In aspects, TR(s) are non-mammalian vertebrates, e.g., birds. In aspects, TR(s) are humans (sometimes also referred to as “patients”). In aspects, TR(s) are non-human animals (NHAs). In aspects, NHAs are livestock/farm animals (e.g., cows, cows, sheep, chickens, goats, geese, bison, ducks, turkeys, and the like), sport animals, companion animals/pets (such as cats, dogs and horses), wild animals (e.g., in methods in which efforts are made to prevent transmission of viruses or other pathogen(s) to human(s) or other animals to preserve populations), zoological animals (e.g., primates), and animals used in laboratory studies (e.g., rodents such as mice, rats, and the like, rabbits, etc.). In aspects, TR(s) are ungulates. In aspects, TR(s) are even-toed ungulates (order Artiodactyl) (e.g., cows, sheep, goats, or pigs).

### 1. Non-HVEM-Expressing TRs

[1392] In aspects, TR(s) are NHA(s) that do not express HVEM or a known HVEM analog. In aspects, such TR(s) include horses or pigs/swine (for which HVEM homologs have not yet been identified and may not be present) or cows (for which no HVEM homolog has been identified and which are expected to not possess a HVEM homolog). In aspects, OSMGAOA gDP(s) delivered to such TR(s) lack any HVEMBD or comprise a HVEMBD with significantly reduced affinity for known HVEM gDR(s). In aspects, CEPs expressed in such methods comprise 1+ NGDPCIs, such as a PD-L1 trap or an anti-PD-L1 Ab. In aspects, SMGAOA gDP(s) in CEPs delivered to such NHA(s) bind N1 or N2.

[1393] In aspects, TR(s) are NHAs known to express HVEM (e.g., dogs, mice, African Green Monkey, and guinea pigs). In aspects, OSMGAOA gDP(s) in CEPs expressed in such TR(s) comprise HVEMBD(s). In aspects, SMGAOA of such gDP(s) exhibit CI properties in such TR(s). In aspects, SMGAOA of such gDP(s) exhibit enhanced HVEM binding WRT to WT gDP(s), e.g., the WT gDP of the virus that infects the species of the TR.

### 2. Non-Immunologically Suppressed TRs

[1394] In aspects, TRs are not immunologically suppressed TRs (ISTRs). In aspects, TRs are not ISTRs that undergoing a condition associated with DOS checkpoint inhibition to DCAs. For example, TRs that have well-developed cancers often have significant checkpoint inhibition. In such TRs although endogenous CAg(s) are present, ICs are either not active or not capable of inducing effective CE(s) due to the checkpoint inhibition. In such TR(s), particularly in HVEM-expressing TR(s) delivery of gDP(s) can induce IR(s)/CE(s) by, in significant part, mostly, or generally through relieving BTLA/HVEM checkpoint inhibition. Methods involving such checkpoint inhibition-blocking gDP(s) are an aspect of the invention. However, delivering CEPESCs to TR(s) that do not exhibit such a form of immunosuppression is another AOTI, as the ability to induce effective IR(s)/CE(s) in TR(s) that do not contain such pre-built up blocked IR(s) is a meaningfully different physiological context in which to induce IR(s)/CE(s) and to treat or prevent disease.

### 3. “Leaky Vaccine” Treated TRs and Leaky Vaccine Only Option TRs

[1395] In aspects, CEPESC(s) are delivered to TR(s) that have been treated with a “leaky vaccine” or TR(s) for which the standard of care only affords a leaky vaccine option (e.g., pigs WRT to PCV or PRRSV or humans or other animals with respect to influenza). AOTI relating to leaky vaccines are DEH. In aspects, the TR(s) are NHA(s) and the CEPESC is administered to a defined population, such as a herd associated with an area, ranch, farm, or other facility/location. In aspects, delivery of CEPESC(s) DOS reduces leaky vaccine effects, such as spread of the condition through the population, through neighboring populations, spread to new members of the population, and the like. In aspects, CEPESCs are delivered to TR(s) for which the available standard of care produces leaky vaccine effects. The inventors have discovered that the CEPESCs and methods of this disclosure can unexpectedly significantly reduce or eliminate leaky vaccine effects and provide a meaningfully different alternative in prevention or treatment of DCA-associated diseases, e.g., pathogen-associated diseases, over currently marketed “leaky vaccine” vaccine products and therapeutics. In aspects, such TR(s) are horses and the method is applied to horses having been treated with an EHV-1 or EHV-4 leaky vaccine or is applied to horses to protect the horses from developing EHV-1 or EHV-4, which currently would be “leaky vaccine” DCAs. The leaky vaccine status of EHVs is described in, e.g., Allen G P et al. “Equid herpesvirus-1 (EHV-1) and -4 (EHV-4) infections.” In: Coetzer, J A W and Tustin, R C (Eds.), INFECTIOUS DISEASES OF LIVESTOCK. 2nd Edn. Oxford Press: Cape Town; 2004. pp. 829-859.

### C. Outcomes—IRs. CEs. Prevention. & Treatment

[1396] Delivering EA(s) of CEPESC(s) to TR(s) DOS induces IR(s), typically causing DOS CE(s), and often resulting in DOS evidence of treatment or prevention of DCA-associated disease(s)/condition(s). Aspects of IR(s), CE(s), and disease treatment/prevention are briefly discussed here. Such AOTI/IR(s) are also DEH & in art CEH. CEPESC(s) can induce any suitable number and type of IR(s). Specific IR(s) are described below and elsewhere here.

[1397] IR(s) include, e.g., DOS T and/or B cell responses, i.e., cellular and/or humoral immune responses, e.g., cytotoxic T cell responses, innate immune response, and innate trained IRs (ITIRs) (e.g., DC or NKC response(s)). Humoral immunity involves plasma cells (activated B cells) and memory B cells, production of Ag-specific Abs by such B cells, & typically resulting neutralization or opsonization of DCAs. Cellular immunity involves the production of effector TC, mTCs, & NKCs, including CD4+ T & CD8+ TCs, responsible for direct (cell-to-cell) or indirect (cytokine-mediated) destruction of infected cells (Wood P R et al. Veterinary Immunology & Immunopathology 54:33-44 (1996) & Allen J E et al. Immunology Today 18:387-392 (1997)).

[1398] IR(s) include DOS “adaptive” IR(s), “innate” IR(s), and “innate trained” IR(s). Such aspects of the immune system are known. Briefly “adaptative immunity” means IR(s) carried out by hematopoietic T cells and B cells derived from the lymphoid lineage. APCs, particularly DCs, recognize DCA(s), process Ag(s), and present Ag(s) via MHC to naive T cells (Th0), Ag-specific TCs are activated leading to expansion into effector TCs (Th1, Th2, and Th17 cells), which prime or implement humoral immunity, pro-inflammatory cytokine secretion, and activation of other ICs. Long half-life T cells become mTCs. “Innate immunity” comprises hematopoietic cells including mast cells, neutrophils, and eosinophils derived from myeloid lineage, and involves non-specific IR(s), such as non-specific DCA-associated cell phagocytosis (e.g., in response to immunostimulatory signals activated neutrophils express Fc and complement receptors allowing increased phagocytosis and activated macrophages secrete proinflammatory cytokines/chemokines such as MIP-1β). “Innate trained immunity” (aka “trained immunity” or “innate immune memory”) refers to the ability of cells typically of hematopoietic lineage e.g., macrophages, monocytes, DCs, & NKCs, to exhibit DOS enhanced IR(s) in reencountering DCAs, resulting in enhanced inflammatory responses and cytotoxic response (aspects adaptable/applicable to AOTI in e.g., Hajishengallis G et al. Adv Exp Med Biol. 2019; 1197:11-26. doi:10.1007/978-3-030-28524-1_2; Lerias J R et al. Front Microbiol. 2020; 10:2924. Published 2020 Jan. 10. doi:10.3389/fmicb.2019.02924; Rusek P et al. Int J Mol Sci. 2018; 19(2):456. Published 2018 Feb. 3. doi:10.3390/ijms19020456; and van der Meer J W et al. Mol Immunol. 2015; 68(1):40-44. doi:10.1016/j.molimm.2015.06.019). The characterization of ITICs is evolving and not consistent (Guilliams M et al. Nat Rev Immunol. 2014; 14(8):571-578. doi:10.1038/nri3712), and the principles here should be interpreted to encompass changes in nomenclature with respect to such cells. In aspects, delivering EA(s) of CEPESC(s) induces “specific” IRs, which include both DOS adaptive IR(s) & ITIR(s). Methods OTI induce/stimulate primary or secondary immune responses. In AOTI, IR(s) comprise DOS memory IR(s). In aspects, memory IR(s) resulting from EA(s) of CEPESC(s) are significantly greater than those obtained with comparable DNA vaccines, PPT vaccines, or even constructs of the Wistar Art but lacking the features of constructs OTI (e.g., i.a., inclusion of an ITICITM, such as ITICSTAP(s) (e.g., EAT-2 PPT(s) or EAT-2 & SAP PPT(s)), inclusion of PTPS(s), and use of EEI(s) and CaPNP(s). Such AOTI are DFEH.

[1399] In aspects, delivery of EA(s) of CEPESCs can result in, e.g., an at least about 2-fold (200%) increase in antigen presentation, such as an at least about 5-fold increase in antigen presentation, an at least about 10-fold increase in antigen presentation, an at least about 20-fold increase in antigen presentation, and at least about 30-fold increase in antigen presentation, an at least about 50-fold increase in antigen presentation, an at least about 100-fold increase in antigen presentation, or more (such as an about 2-about 100, about 10-about 100, about 20-about 100, about 2-80, about 5-80, about 10-80, about 2-50, or about 5-50 increase in antigen presentation) (measuring antigen presentation is exemplified in Mahnke K, et al. J Cell Biol. 2000; 151(3):673-684. doi:10.1083/jcb.151.3.673).

[1400] In aspects, CEPESCs induce DOS IR(S) in bystander ICs. In aspects, such IR(s) comprise DOS IR(s) in bystander DCs. In aspects, such IR(s) comprise DOS IR(s) in bystander TCs. Aspects of bystander immunity and ICs are described in, e.g., Whiteside S K et al. Trends Immunol. 2018; 39(12):1021-1035. doi:10.1016/j.it.2018.10.003 and Macdonald D C, et al. J Immunol. 2014; 193(10):5056-5064. doi:10.4049/jimmunol.1301723.

[1401] IRs can comprise IC phenotype skewing, expansion, maintenance, differentiation, dedifferentiation, survival, proliferation, cytotoxicity, persistence, and/or cell recall/memory, thereby improving the therapeutic potential of the immune cells. In a T cell population, for example, phenotype skewing towards naive, stem cell memory, or central memory T cells results in an increased number or relative ratio of the naive, stem cell memory, or central memory T cells subpopulation and/or decreased number or relative ratio effector memory or effector T cell subpopulation through modulating maintenance, expansion, differentiation, and/or de-differentiation thereof, are indicative of better quality of the T cells for improved in vivo adoptive therapeutic potential. In one embodiment, the number or proportion of naive TCs. IRs can comprise DOS increases in IC proliferation, cytotoxicity, or persistence. In aspects, IR(s) comprise an increased number or relative ratio of naive T cells (Tn), stem cell memory T cells (Tscm), and/or central memory T cells (Tcm), and/or improved cell proliferation, cytotoxicity, cell recall, and/or persistence in comparison to the T cells without the same treatment. In some embodiments, the number of Tn, Tscm, and/or Tcm is increased by at least 10%, 20%, 30%, 40%, 50%, 60%, 70%, 80%, 90%, or more, or increased by at least 2, 3, 4, 5, 10, 15, or 20 fold, or more, compared to the number of Tn, Tscm, and/or Tcm in the cell population without the same treatment. In aspects, the population or subpopulation of NK cells contacted with one or more of said modulating agents comprises an increased number or relative ratio of adaptive (or memory) NK cells, and/or improved cell proliferation, cytotoxicity, cell recall, and/or persistence in comparison to the NK cells without the same treatment. In aspects, the number of adaptive NK cells is increased by at least 10%, 20%, 30%, 40%, 50%, 60%, 70%, 80%, 90%, or more, or increased by at least 2, 3, 4, 5, 10, 15, or 20 fold, or more, compared to the number of adaptive NK cells in the cell population without the same treatment. In aspects, EA(s) of CEPESC(s) results in IR(s) comprising DOS increased number or activity of activated TCs (CD134+, CD137+, and FOXP3+); increased number or activity of activated NKCs (e.g., NKp46+ NKCs), increased eosinophil counts, improved Teff to Treg ratio, increased active phenotype monocytes (CD16+ and CD68+), or increased total monocyte counts.

### 1. IC-Specific IRs

[1402] As reflected above, CEPESC(s) can induce IR(s) in different ICs and groups of ICs. ICs include cells of hematopoietic origin; lymphocytes, such as B cells and T cells; natural killer cells; and myeloid cells, such as monocytes, macrophages, eosinophils, mast cells, basophils, and granulocytes. In aspects, IR(s) are induced in cells that are not classified as ICs, but which are capable of IR(s), such as fibroblasts. Induction of IR(s) in such non-IC cells are DEH. Hematopoietic progenitor cells typically can be categorized as either myeloid progenitors or lymphoid progenitors. The myeloid progenitor cells are able to give rise to myeloid lineage cells including platelets, eosinophils, basophils, neutrophils, monocytes, and erythrocytes. Lymphoid progenitor cells are capable of differentiating into T-cells and B-cells, i.e., adaptive immunity cells. In aspects, CEPESCs induce IR(s) in such cells. In aspects, CEPESCs also induce IR(s) directed against cells of such lineage that are impacted by DCA(s) (e.g., induce IR(s) mediated by NKCs activated by EAT-2, gDP(s), and Ag(s) against hematopoietic lineage DCA-associated cells).

[1403] IR(s) can involve multiple facets of any such categories of IRs and IRs that involve “crosstalk” between such different aspects of the overall IR. E.g., subsets of a3 T cells restricted by the non-polymorphic MHC class I-like molecules CD1d and MHC-related protein 1 (MR1) (known as invariant NKT cells and mucosa-associated invariant T cells, respectively), as well as T cells expressing γδ TCRs5 (non-conventional, innate-like or transitional T cells) recognize conserved non-peptide antigens that are upregulated by stressed cells, the expression modalities and distribution of which resemble those of pathogen-associated molecular patterns (PAMPs) or danger-associated molecular patterns (DAMPs) recognized by PRRs. These cells acquire a pre-activated phenotype associated with the upregulation of memory markers early in their development. This pre-activated status allows rapid induction of effector functions following the detection of tissue stress. Such cells are implicitly included in AOTI relating to innate trained immunity cells, but also can represent an independent AOTI. E.g., in aspects CEPs comprise agonists of such cells, Ag(s), gDP(s), and optionally cytokine(s), such as IL-2 PPTs. CEPESCs can induce multiple IR pathways (aspects of which are described in, e.g., WO2012006377 & US20130177639;).

[1404] CEPESCs typically exhibit enhanced IR(s) as compared to administration of Ag(s) as PPTs, administration of DNA vaccines comprising such Ag(s), or even over corresponding constructs designed according to the principles of the Wistar Art. E.g., IR(s) arising from EA(s) of CEPESCs can be increased by about 20-500%, e.g., about 33-300%, e.g., about 50-250%, or about 75% to about 200% (e.g., about 20-200%). E.g., IR(s) can be increased by at least about 60%, 70%, 85%, 90%, 95%, 97%, 110%, 120%, 125%, or 130%. In aspects, IR(s) increased by at least about 1.5-fold, 2.0-fold, 2.5-fold, 3.0-fold, 4.0-fold, 5.0-fold, 7.0-fold, 8.0-fold, or at least about 10.0-fold.

[1405] In aspects, CEPESCs induce DOS IR(s) in adaptive ICs, innate ICs, or innate trained ICs. In aspects, CEPESCs induce humoral IR(s), cellular IR(s) (e.g., cytotoxic IR(s) or cytokine-expression IR(s)), or both. In aspects, CEPESCs induce IR(s) in APCs, e.g., DCs. In aspects CEPESCs induce IR(s) in T, NK and NKT cells. In aspects, CEPESCs induce IRs in BCs, TCs, and DCs. In aspects, CEPESCs induce DOS IRs in, i.a., BCs, TCs, DCs, and NKCs. In aspects, IR(s) in TCs include both CD4 TCs and CD8 TCs. In aspects, such IR(s) comprise an increase in the number of such cell(s) in TR(s) or an increase in the relative ratio of such cells (e.g., an increase in the number or ration of stem cell memory TCs or central memory TCs).

### i. Adaptive IC IRs

[1406] In aspects, IR(s) comprise adaptive IC IR(s). In aspects, such IR(s) comprise DOS TC IR(s), BC IRI(s), or both. As DEH, BC IR(s) comprise DOS increased Ab production and other BC IR(s) such as opsonization. E.g., in aspects, CEPESCs result in an increase in TC frequency of at least 2×, at least 2.5×, at least 3×, at least 3.5×, or more over baseline, a suitable period after initial administration or after 2 or 3 administrations of CEPESCs (e.g., 2-16, 2-12, or 2-10 weeks after initial or boosting administration).

[1407] CEPESCs can induce TC IRs in several type of T cells at various developmental stages, including but not limited to, CD4+/CD8+ double positive T cells, CD4+ helper T cells (e.g., ThI and Th2 cells), CD8+ T cells (e.g., cytotoxic T cells), stem cell memory T cells (Tscm), peripheral blood mononuclear cells (PBMCs), peripheral blood leukocyte (PBL)-associated TCs, tumor infiltrating lymphocytes (TIL) TCs, memory T cells, naive T cells, regulatory T cells, gamma delta T cells (γδ T cells), as well as Th3, Thl7, Th9, or Tfh cells. Additional types of memory T cells include cells such as central memory T cells (Tcm cells), effector memory T cells (Tem cells and TEMRA cells). In aspects, TCs are isolated/modified TCs, e.g., T cells modified to express a T cell receptor (TCR) or a chimeric antigen receptor (CAR).

[1408] In aspects, CEPESCs DOS enhance the ratio of T effector cells (e.g., T effector cells specific to Ag(s) in CEPs) to regulatory T cells (Tregs), e.g., in an organ of a TR (e.g., the spleen), in tumor(s), or in the TR overall.

[1409] In aspects, CEPESCs DOS enhance CD8 TC IR(s). In aspects, CD8 TC IR(s) comprise DOS Th1-cytokine expression, such as DOS IFN-γ. In aspects IR(s) comprise DOS CD8 TC production of granzymes or perforins. In aspects, IR(s) comprise DOS TC killing of DCA-associated cells. In aspects, CD8 TC IR(s) comprise DOS TC expression of TNF-α, and IL-2. In aspects, IR(s) comprise detectable increase in CD8 TCs or specific CD TC(s) (e.g., CD8 TCs specific for Ag(s) in CEPs). In aspects, IR(s) comprise an increased proportion of CD8 TCs among TCs or as compared to DCA-associated cells in a TR. In aspects, the number of Ag-specific CD8 TCs, the amount of Th1 cytokines expressed in TRs, or both, in response to EA(s) of CEPESC(s) are enhanced by 1.5×, 2×, 2.5×, 2.75×, 3×, 3.25×, 3.5×, 4×, 4.5×, or 5×. In aspects, IR(s) comprise other DOS enhancements of CD8 TC IRs, which are known (SFE Cox M A, Zajac A J. Shaping successful and unsuccessful CD8 T cell responses following infection. J Biomed Biotechnol. 2010; 2010:159152. doi:10.1155/2010/159152).

[1410] In aspects, delivery of EA(s) of CEPESC(s) induces DOS CD4 TC IR(s). In aspects, CD4 TC IR(s) comprise Th1 or Th2 CD4 IR(s) (e.g., expression of IFN-γ and expression of IL-4, IL-5, and IL-13, respectively). In aspects, CD4 TC(s) comprise DOS upregulation of ligands, such as CD80 and CD86, on DCs. In aspects, CEPESCs comprise known non-DCA-associated (universal) CD4 epitope Ag(s), such as PADRE epitopes or natural tetanus sequences. In aspects, universal or other CD4 epitopes are fused to CD8⁺ T epitopes. In aspects, such CEPs also include other known or predicted Ag-specific CD4 TCEs. Such AOTI are DEH. In aspects, CEPs further comprise CD40 ligand PPTs, which can enhance TC IR(s) and DC IR(s).

[1411] In aspects, CEPESC(s) induce DOS CD4 and CD8 TCs. In aspects, the CD4 and CD8 TC IR(s) are balanced in a manner that DOS enhances CD8 mTCs in TRs as compared to in the absence of CD4 IRs or significantly lower CD4 IRs. In aspects, IR(s) comprise a DOS increase in the number of CD8 T cells phenotypically evidencing they were primed and maintained in the presence of CD4 TCs, e.g., by expression of markers CD62L^{lo/hi}, CD122^{hi}, and CD127^{hi} (versus CD62L^{lo}, CD122^{lo}, and CD127^{lo}. Thus, an enhanced ratio of the former to the latter is an AOTI, as is DOS enhanced CD8 TC cytokine expression, or both. In aspects, CD4 TC IR(s) comprise DOS expression of IL-2 and IL-21, upregulation of B lymphocyte-induced maturation protein 1. In aspects, CD4 TC IR(s) comprise DOS increases in mTC populations.

### ii. ITIC IR(s)

[1412] In aspects, delivering EA(s) of CEPESC(s) induce ITIC IR(s). In aspects, ITIC IR(s) include DOS increased population, activation, or both of NKC(s) (e.g., granzyme B⁺ NK cells), monocytes (e.g., HLA-DR⁺ monocytes), macrophages, NKCs, DCs (e.g., CD8α+ DCs), NKT cells (e.g., Type I NKT cells), or combinations. In aspects, such IR(s) comprise increases in concentration(s) of such cells in tissues/organs of a TR, increased numbers of SMGAOA of such cells, increased activation of OSMGAOA of such cells, or combinations. In aspects, ITIC IR(s) comprise DOS enhanced production of IL-6, TNF-α, IL-1β, IL-18, IL-12, L-1b GM-CSF, IL-23, or combinations. In aspects, such IR(s) comprise enhanced IFNg production by NKCs, enhanced production of IL-12 by DCs, or both. In aspects, IR(s) comprise DOS enhanced production of IL-2, IFNg, TNF-α, IL-4, or combinations. In aspects, DC(s) primarily, generally, or only promote Th1 CD4 TC IR(s). In aspects primarily, generally, or only promote Th2 CD4 TC IR(s). In aspects, CEPESCs DOS induce DCs to promote both Th1 and Th2 TC IR(s). In aspects, CEPESCs comprise IL-12 PPTs and DOS induce Th1-associated DC IR(s). In aspects, IR(s) comprise DOS polarization of ITIC(s) or other IC(s). In aspects, IR(s) comprise repolarization of macrophages. In aspects, IR(s) comprise DOS increases in population, activity, or both of NKCs that are CD3− and CD56+, expressing and have at least one of CD57+, NKG2C and CD57, and optionally, CD 16, but exhibit DOS low expression (or no detectable expression of) PLZF, I=SYK, FceRy, FcsRy, TIGIT, IPD1, CD7, or CD161, and further may exhibit DOS high levels of LILRB1, CD45RO, or CD45RA. In aspects, IR(s) comprise DOS enhanced proliferation or activation of NKCs exhibit DOS enhanced NKG2C or CD57, or CD57, CD16, NKG2C, CD57, NKG2D, NCR ligands, NKp30, NKp40, NKp46, NKG2A, or DNAM-1. In aspects, IR(s) comprise DOS NKC expression of perforin or granzyme. Other various aspects of ITIC IR(s) associated with CEPESC delivery are DEH.

### 2. Non-IC IR(s)

[1413] In aspects, CEPESCs induce DOS IR(s) in non-immune cells. In aspects, such non-IC IR(s) are in addition to DOS IR(s) in IC(s). Examples of non-IC(s) that can exhibit IR(s) include mesenchymal stem cells which can comprise Toll-Like Receptors (TLRs) and exhibit IR(s) comprising production of pro-inflammatory cytokines IL-8, MCP-1, and IL-6; hematopoietic stem cells, in which IR(s) comprise production of pro-inflammatory cytokine IL-1β, production of GM-CSF; epithelial stem cells which express TLRs and exhibit IR(s) comprising DOS production of immunomodulator factors and antimicrobial peptides; intestinal stromal cells, microglial cells, and fibroblasts (in which IR(s) comprise production of antimicrobial peptides, cytokines, chemokines, and growth factors). CEPESCs can induce DOS IR(s) in OSMGAOA of such cells. In these and other AOTIs, IR(s) also or alternatively can comprise DOS induction of immunometabolism effects in ICs, non-ICs, or both. In aspects, IR(s) in non-IC(s) comprise memory immune responses. Aspects of IR(s) in non-IC(s) including memory responses therein are described in, e.g., Hamada A, et al. Front Microbiol. 2019; 9:3225. doi:10.3389/fmicb.2018.03225.

### 3. Multi-Faceted IR(s)

[1414] In aspects, CEPESCs result in DOS induction/enhancement of IR(s) in TCs, BCs, and ITICs. In aspects, such IR(s) in ITIC(s) comprise IR(s) in DCs, NKCs, or both. In aspects, such TC IR(s) comprise DOS CD8 and CD4 IR(s). In aspects, such IR(s) also comprise DOS induction of adaptive memory IR(s) and innate trained memory IR(s). In such aspects, CEPESC(s) typically comprise ITICIMs, such as ITICITIMs, such as ITICSTAPs, e.g., EAT-2 PPTs or EAT-2 PPTs and SAP PPTs; MHCI and MHCII TCEs; and gDPs; and optionally comprise other features such as Ag-associated PTPS(s), and are expressed from NSs comprising EEI(s) and associated with TFA CaPNPs. In aspects, CEPESC(s) induce IR(s) that are DOS greater in at least one such facet (BC IRs, CD4 TC IRs, CD8 TC IRs, ITIC IRs (or DC IRs or NKC IRs)) than arising from corresponding Ag(s), Ag-expressing DNA vaccines, or even Wistar Art constructs lacking such features.

### 4. Immunological Memory

[1415] As DEH, AOTI include DOS induction of immune memory IR(s). In aspects, delivery of EA(s) of CEPESC(s) induces memory IR(s) that are DOS improved as compared to corresponding PPT Ag(s), DNA vaccines encoding such Ag(s), or even Wistar Art constructs lacking the features of CEPESCs OTI. In aspects, such IR(s) comprise a DOS increase in the number of ICs that exhibit a memory phenotype. In aspects, such IR(s) comprise a DOS faster IR(s), more extensive IR(s), or both, when the TR is re-challenged with a DCA or similar DCA. In aspects, memory IR(s) comprise adaptive memory IR(s) (e.g., enhanced numbers of memory T cells). In aspects, memory IR(s) comprise innate trained memory IR(s) (e.g., enhanced memory NKC IRs, enhanced memory DC IRs, or other enhanced ITIC IRs, such as memory macrophage IRs). In aspects, memory IR(s) comprise both adaptive memory IR(s) and ITIC memory IR(s). In aspects, memory IR(s) include non-IC memory IR(s). In aspects, memory ITIC(s) exhibit epigenetic or transcriptional reprogramming change(s) that reflect a memory immunity state (e.g., histone modifications). Such aspects of ITIC memory adaptable to such AOTI are described in Hajishengallis G, et al. Adv Exp Med Biol. 2019; 1197:11-26. doi:10.1007/978-3-030-28524-1_2. In aspects, memory IR(s) comprise DOS enhancement in memory BC IR(s), such as faster or enhanced Ab production to re-challenge with a DCA. In aspects, memory IR(s) are greater than initial response(s) (e.g., anti-DCA Ab concentration is greater in a memory BC IR). In aspects, such greater memory IR(s) is/are at least 5×, at least 10×, at least 20×, at least 40×, at least 50×, at least 75×, at least 90×, at least 100×, at least 200×, at least 500×, at least 750×, or even about 1000× initial IR(s), in aspects being maintained after other signs of IR subside. In aspects, memory IRs comprise increases of types of memory ICs of at least 5%, at least 10%, or more, in aspects after initial IRs subside. In aspects, memory IR(s) comprise DOS enhanced population of memory phenotype IC(s), even after initial IR(s) have subsided. In aspects, challenge of CEPESC vaccinated TRs with antigen(s), DNA vaccine, or the like results in a DOS mTC response within about 5 days of such challenge, optionally followed by a mBC response maximizing around 1 month after such challenge. In AOTI, memory BC IR(s) comprise production of Abs with higher affinity for Ag(s) than initial IR. In aspects, memory IR(s) comprise DOS enhanced levels of effector memory T cells, central memory TCs, resident TCs, or combinations. In aspects, memory IR(s) comprise memory IR(s) in gamma delta TCs. In aspects, memory IR(s) comprise enhanced CTL IR(s) as compared to initial CTL IR(s). In aspects, memory IR(s) are exhibited in non-ICs. In aspects, such memory IR(s) comprise accelerated wound healing. In aspects, EA(s) of CEPESC(s) DOS enhance NKCs with memory markers, such as DOS enhanced CXCR6 expression, FcγR (including CD16) expression, Ly49H expression, but lacking/lower expression of intracellular γ-signaling chain and KLRG1⁻. In aspects, memory IR(s) include DOS increases in number of TCs with memory phenotypes/markers (e.g., CD127^{hi}KLRG-1^{lo}CD62L^{hi}Bcl-2^{hi}). In aspects, memory IRs induced by EA(s) of CEPESC(s) comprise multiple-facets of memory IR(s), such as combinations of SMOA of memory TCs, memory BCs, memory DCs, memory NKCs. Such aspects of memory IR(s) that can be generated by EA(s) of CEPESC(s) and various assays for establishing levels of memory IR(s) are described in T. V. Chirkova, et al. Clinical and Vaccine Immunology September 2011, 18 (10) 1710-1718; DOI: 10.1128/CVI.05116-11; Hole, C. R et al. https://doi.org/10.1038/s41467-019-10486-5.Nat Commun 10, 2955 (2019); Plotkin S A & Mortimer E A. Eds., 1994. Vaccines. Second Edition, WE Saunders, Philadelphia; Olson et al. Am. J. Vet. Res. 49, 1460-1466 (1988), Sprent et al. Science 265, 1395-1400 (1994), Alderink et al. Am. J. Vet. Res. 207, 1016-1018 (1995) Schultz (1995), Smith Am. J. Vet. Res. 207, 421-425 (1995); Alderink et al. J. Am. Vet. Med. Assoc. 207, 1016-1018 (1995); Dodds Proc. Am. Holistic Vet. Med. Assoc. 74-80 (1995); Dodds Vaccine Related issues In Complementary and Alternative Veterinary Medicine, A. M. Schoen & S. G. Wynn, eds. pp. 701-702 (1997); & Scott et al. Feline Pract. 25, 12-19 (1997), Blumerman S L et al. Eur J Immunol. 2007; 37(5):1204-1216. doi:10.1002/eji.200636216; Samji T et al. Immunol Lett. 2017; 185:32-39. doi:10.1016/j.imlet.2017.02.012; Paust S, Blish et al. J Virol. 2017; 91(20):e00169-17. doi:10.1128/JVI.00169-17; Boraschi D et al. Front Immunol. 2018; 9:799. doi:10.3389/fimmu.2018.00799; O'Sullivan T E et al. Immunity. 2015; 43(4):634-645; & US20050220815.

### 4. Efficacy of IR(s)/Analytical Methods

[1416] The various IR(s) that can be induced by EA(s) of CEPESC(s) can be measured by any suitable technique. Such methods are known and, accordingly, only briefly discussed here. Well-known methods include use of flow cytometry, target cell lysis assays (e.g. chromium release assay), the use of tetramers, and others. The detection of DOS IR(s) by these and any other described similar method each represents a separate AOTI. In aspects, DOS IR(s) are established by assaying Ab production, measuring IC proliferation, measuring release of cytokines, measuring expression of cell surface markers (e.g., by flow cytometry), measuring cytotoxicity, and the like. BC IRs can be assessed by, e.g., immunoblotting (detecting membrane-bound proteins), including dot blotting, immunohistochemistry (cell or tissue staining), enzyme immunoassays, immunoprecipitation, immunohistochemistry, RIA (radioimmunoassay), and other EIAs (enzyme immunoassays), such as ELISA. Other relevant methods adaptable to AOTI include chromium release CTL assay, PBMC and blood screening, tumor screening methods, fluorescence immunostaining, phagocytosis analysis, cytokine and chemokine analysis, or virus neutralization assays. Flow cytometry methods can identify ICs comprising markers of immune activation, immune memory, tolerance, and the like, and can be applied to DCs, NKCs, CD8 TCs, CD4 TCs, CD4CD8 TCs, BCs, macrophages, monocytes, and non-ICs, examining for markers such as, FoxP3, perforin, and the like. Methods and principles described in, e.g., —Lugli E et al. Cytometry A. 2010; 77(7):705-713. doi:10.1002/cyto.a.20901 and iMontante S, et al. Int J Lab Hematol. 2019; 41 Suppl 1:56-62. doi:10.1111/ijlh.13016. ELISpot assays also can be used to assess IR(s) as exemplified elsewhere here and described in, e.g., Dittrich M., Lehmann P. V. (2012) Statistical Analysis of ELISPOT Assays. In: Kalyuzhny A. (eds) Handbook of ELISPOT. Methods in Molecular Biology (Methods and Protocols), vol 792. Humana Press, Totowa, N.J.; Schmittel et al. (2001) J Immunol Meth 247(1-2): 17-24, U.S. Pat. No. 5,750,356; & U.S. Pat. No. 6,218,132. Tetramer assays also can be used to assess IR(s) and are discussed in, e.g., Skinner et al. (2000) J Immunol 165(2):613-7. Other relevant methods are described in HANDBOOK OF IMMUNOBLOTTFNG OF PROTEINS, Vol. 2, Zoa (1995) DIAGNOSTIC IMMUNOPATHOLOGY: LABORATORY PRACTICE AND CLINICAL APPLICATION, Cambridge University Press, Diamond (2000) PROTOCOLS IN FLOW CYTOMETRY AND CELL SORTING, Springer Verlag, Jaroszeki (1998) FLOW CYTOMETRY PROTOCOLS, 1st Ed., Shapiro (1995) PRACTICAL FLOW CYTOMETRY, 3rd edition, Rieseberg et al. (2001). In aspects, IR(s) comprise DOS increases in OSMOA of such measures.

### 5. Clinical Effects

[1417] In aspects, delivering EA(s) of CEPESC(s), alone or AAW AACs, results in DOS CE(s) in TR(s). In aspects such CE(s) contribute to treating or preventing a DCA-associated disease or a condition in TR(s).

[1418] In aspects, CEPESCs are delivered as a prophylactic method (a vaccination/immunization method). In such methods TRs typically do not display signs or symptoms of a disease or displays only early signs or symptoms of a disease. In such aspects, CE(s) comprise diminishing, preventing, or decreasing the risk of developing the DCA-associated disease.

[1419] In aspects, CEPESCs are delivered to TRs to therapeutically treat an individual in need thereof. Such TRs typically display symptoms or signs of disease and CE(s) comprise diminishing or eliminating those signs or symptoms of disease in the TR.

[1420] In aspects, CE(s) associated with delivery of EA(s) of CEPESC(s) comprise reducing the incidence of a DCA-associated disease (e.g., a pathogenic disease or cancer) in TR(s); ameliorating symptoms of a disease; increasing survival or chances of survival (e.g., as determined by significant results in clinical study(ies)); stabilizing/halting reducing or minimizing progression of a disease; inducing, expediting or enhancing a state of remission or recovery; enhancing the efficacy or protective effects of CCCs/AACs; decreasing the number or frequency of relapse episodes; increasing latency between symptomatic episodes; reducing the severity, extent, or duration of episodes/disease/symptoms; reducing the number of symptoms or ameliorating symptoms; or combinations.

[1421] In aspects, delivery of CEPESCs are AW DOS reduced AE(s) as compared to corresponding PPT Ag compositions, DNA vaccines lacking most/generally all of CEPESCs OTI, or even Wistar Art constructs lacking SMGAOA of features of CEPESCs OTI not included in the Wistar Art such as ITICSTAP EP(s) (e.g., EAT-2 PPT(s)), deimmunized EP(s) (e.g., BCE removal variants, GSRV(s), etc.), CD4 and CD8 TCEs, modified gDP(s), Ag-associated PTPS(s), NAV deliver vehicle(s), and NAV-associated CaPNP(s). In aspects, Grade 3 AEs (severe AE(s)), Grade 4 AEs (life threatening/disabling AE(s)), or both, or serious grade 3/4 AEs—SAEs) associated with CEPESC(s) are less than 25%, less than 20%, less than 15%, less than 12%, less than 10%, less than 8%, or less than 5% in TR(s) (e.g., as determined by 1-4, e.g., 2-3 clinical studies). Grading of AEs is described in US FDA and other guidance materials (SFE Smit et al. Journal of Clinical Oncology 2017 35:15_suppl, 2544-2544). Other AOTI relating to safety of CEPESCs (e.g., low occurrence of cytokine storm events) are DEH.

[1422] In aspects, CEPESCs are delivered to TR(s) prior to occurrence, emergence, or detection of a DCAAD. In aspects, TR(s) lack any history of autoimmune disease or cancer prior to initial CEPESC delivery. In aspects, TR(s) lack any history of pathogen infection prior to treatment with a pathogen Ag-expressing CEPESC. In aspects, EA(s) of CEPESC(s) are administered therapeutically, e.g., to a subjects who has a preexisting condition, e.g., a subject who is infected with a pathogen, has a cancer, or both.

### b. Reduced Cytokine Storm/VAERD Risks

[1423] In aspects, CEPESCs comprise one or more features that DOS reduce cytokine expression-associated AEs (CEAAEs) in TR(s) and methods of delivering CEPESCs can comprise steps to reduce risk of CEAAE(s), including delivering CEPESC(s) incorporating such features. Examples of such cytokine-AE-reducing features (CARFs) associated with CEPESCs include deimmunization of OSMGASAOA EP(s) of CEPs, e.g., by GSRVs, elimination of non-DCA associated BCEs; or combinations; selection of Ag(s) to primarily, generally, or at least substantially direct TC IRs, e.g., to Th1 TC IRs or CD4 Th1 TC IRs; and combinations. Methods directed to reduce CEAAE risk(s) comprise assessing TR(s) for such risk(s), monitoring TR(s) for the development of such conditions or indicators of risk factor(s) for such conditions, and changing dosing regimens, medicament(s), applying AACs, or combinations thereof in response to incurring conditions associated with CEAEE(s) or risk of CEAEE development. In aspects, such CEPESCs, methods, or combination of both ACB DOS reduced cytokine-related AEs than treatment with compositions lacking present CARF(s), methods lacking CEAEE-risk reduction step(s) or lacking any employed combinations. In aspects, such reduced risks comprise reduce occurrence of Vaccine-Associated Enhanced Respiratory Disease (“VAERD”) or conditions thereof (e.g., DOS dysregulation of proinflammatory or anti-inflammatory cytokine(s), e.g., DOS increased IL-1b levels or IL-2 levels, DOS decreased IFNa or IL-10 levels, and DOS associated AEs, e.g., DOS increased rate, duration, or severity of pneumonia, anorexia, lethargy, coughing or other respiratory disease(s), dyspnea, fever, or combinations). VAERD is known and symptoms associated with VAERD applicable to AOTI are described in Rajão D S et al. J Gen Virol. 2016; 97(7):1489-1499. doi:10.1099/jgv.0.000468; Gauger P C et al. Viral Immunol. 2013; 26(5):314-321. doi:10.1089/vim.2013.0018; Gauger P C et al. Virology. 2014; 471-473:93-104. doi:10.1016/j.virol.2014.10.003; and Guager, P. C. 2012. https://lib.dr.iastate.edu/cgi/viewcontent.cgi?article=3333&context=etd. Iowa State University Graduate Thesis. In aspects, such methods are associated with the treatment or prevention of influenza, RSV, dengue viruses, coronaviruses, Ross River virus (RRV), human Metapneumovirus (hMPV), immunodeficiency viruses (such as HIV, SIV, or FIV), Equine Infectious Anemia virus (EIAV); measles virus; West Nile (WNV); Japanese Encephalitis virus (JEV), Lactate Dehydrogenase Elevating virus (LDEV),64 Rabies virus (RV), Aleutian Disease virus (ADV), PRRSV, PCV, or ASFV or other pathogenic infections such as Mycobacterium spp., Listeria monocytogenes, Coxiella burnetii and Salmonella spp. & Leishmania spp. Other conditions similar to VAERD that can be DOS reduced by such CEPESCs and methods comprise enhanced pulmonary disease (EPD) of HMPV, enhanced respiratory disease (ERD) of RSV, atypical measles (ATM) of MV, Dengue hemorrhagic fever (DHF) or Dengue shock syndrome (DSS) of dengue virus infection, and the like. In aspects, CEPESCs exhibit DOS enhanced efficacy, DOS reduced AEs, or both in conditions CB sub-neutralizing Ab IRs, e.g., RSV, influenza, or measles virus.

### 5. Pathogenic Disease Treatment/Prevention

[1424] In aspects, EA(s) of CEPESC(s) are delivered to TR(s) to induce IR(s) or CE(s) against pathogen(s) or to treat or prevent pathogenic disease(s). In aspects, CEPESCs are delivered to TR(s) that have failed other treatment(s) (e.g., antivirals or antibiotics) or exhibited incomplete protection from previously administered vaccines. In AOTI, CEPESCs are delivered to TRs to treat a latent infection, such as a latent viral or bacterial infection, such as a MRSA or Clostridium infection. In aspects, EA(s) of CEPESC(s) DOS enhance the efficacy of AAC(s) or CCC(s), e.g., antibiotics or antivirals for therapeutic use or other vaccine(s). In aspects, pathogen(s) treated by EA(s) of CEPESC(s) comprise those pathogen(s) DEH. In aspects, delivery of EA(s) of CEPESC(s) DOS reduces spread of pathogenic DCA(s) in a population or from population-to-population or species-to-species (e.g., from dogs to humans, pigs to humans, etc.). In AOTI, CEPESC(s) provide “sterilizing immunity” against DCA(s) in DOS TR(s). Examples of such pathogen(s) include IV in various TR(s) (treated/prevented by, e.g., CEPESCs comprising H3/H1 Ag(s), or H3N8, H3N2, H1N1, H5N1, H3N1, or H1N2 Ag(s) such as NP, HA (e.g., HA stalk), or M1 Ag(s)), PCV, PRRSV, ASFV, & various forms of COV in humans or NHA(s).

[1425] Further exemplifying how AOTI DEH also provide corresponding methods of inducing IR(s), CE(s), and treating or preventing pathogenic DCAAD(s), in aspects pathogen(s) are treated or prevented in NHAs, e.g., non-HVEM NHAs, e.g., swine or cows. In aspects, such TR(s) are treated for viral pathogens, such as PRRSV (CEP(s) comprising PRRSV Ag(s) as DEH) and in aspects such CEPESC(s) are AAW other vaccines/therapeutics, such as attenuated PRRSV vaccines, a classical swine fever virus (CSFV) vaccine, pseudorabies virus (PRV) vaccine, PCV vaccine, or combination (or corresponding CEPESC(s), DNA vaccines, and the like). In aspects, CE(s) associated with such methods comprise DOS enhancement in NKC numbers/activity, cytokine expression (e.g., IL-4, IL-12, IL-10, or IFNg expression), enhanced TC population/activity; and other CE(s) such as reduced viral shedding, reduced spreading, reduced symptoms, reduced fatalities, etc. Aspects of PRRSV and effective treatment applicable to AOTI are described in Li B et al. Emerg Infect Dis. 2009; 15(12):2032-2035. doi:10.3201/eid1512.090390. In aspects, CEPESCs induce different or enhanced anti-PRRSV IR(s) WRT Porcilis PRRS from Merck, Ingelvac PRRSFLEX EU from Boehringer Ingelheim, Amervac-PRRS from Hypra, Pyrsvac-183 from Syva, Fostera PRRS from Zoetis, Ingelvac PRRS MLV/Ingelvac, or PRRSATP from Boehringer Ingelheim or even WRT to a Wistar Art-like construct lacking feature(s) associated with CEPESC(s) OTI (e.g., enhanced nectin-1 binding, no-HVEMBD, soluble gD status, incorporation of gDSS, incorporation of PTPS(s), deimmunized Ag(s), inclusion of ITICITMs, such as ITICSTAPs, such as EAT-2 or EAT-2+ SAP, association with CaPNPs, and expression from NAM(s) comprising EEI(s). In aspects, delivering EA(s) of CEPESC(s) DOS enhances efficacy of IR(s), duration of IR(s), or both WRT pathogenic DCAs, e.g., ASFV. In aspect(s), such results are obtained with 3 administrations or less or 2 administrations or less. In aspects, such anti-ASFV CEPs comprise ASFV p32, p54 or p72 Ags or other ASFV Ag(s) DEH. In aspects, treatment or prevention of IR(s) comprises delivering CRA(s) or PCRA(s) (e.g., Ag(s) detected in association with DCA-infected cells in TR(s) or in similar subjects/patients). In aspects, delivery of such CEPESCs results in DOS enhanced DC, NKC, CTL, CD4+, and TCR-γδ T-cell responses in TR(s) as compared to use of non-CRA/PCRA Ag(s). In aspects, CEPESC(s) provide protective effects against DCA challenge or re-challenge independent of the number of exposure(s) over the lifetime of TR(s). In aspects, CEPESC(s) are administered as a treatment when a latent pathogen is detected to emerge from latency. E.g., CEPESCs comprising Leishmania parasite Ag(s) can be used in a CEPESC that induces significant CD4 responses and significant memory IC responses and provides significant CE(s) relating to treatment of such a condition (e.g., treatment of cutaneous leishmaniasis skin sores, visceral leishmaniasis internal organ damage, or both). In aspects, CEPESCs are administered to both human and NHA in close proximity for the same DCA, e.g., companion animals and humans living or working in proximity can receive CEPESCs comprising anti-pathogen Ag(s), such as anti-leishmaniasis Ag(s), anti-coronavirus Ag(s) or anti-influenza Ag(s), or humans and NHA livestock animals can receive CEPESCs comprising anti-PCV Ag(s), anti-PRSV Ag(s), and the like. These AOTI can be applied to/combined with AOTI relating to CEPs/CEPESCs DEH and vice versa.

### 6. Cancer Treatment/Prevention

[1426] In aspects, EA(s) of CEPESC(s) are delivered to treat or prevent cancer. In aspect(s), CEPESC(s) are delivered to TR(s) that exhibit preneoplastic, premalignant, or precancer(ous) conditions (“precancer conditions”). Indicators of precancer and triggers for treatment can comprise detection of differences in cells from nearby or closely related nonneoplastic counterparts that signal the onset of cancer progression, uncontrolled growth (e.g., by exceeding the “Hayflick limit”), or detection of the start of cancer progression, neoplasm(s), or preneoplastic lesion(s) (e.g., ductal carcinoma in situ (DCIS) growths in breast cancer, cervical intra-epithelial neoplasia (CIN) in cervical cancer, adenomatous polyps of colon in colorectal cancers, atypical adenomatous hyperplasia in lung cancers, and actinic keratosis (AK) in skin cancers). In aspects, TR(s) have gene expression profiles that indicate a difference between normal, precancerous, and cancer cells (e.g., familial adenomatous polyposis gene expression signaling a risk of colon cancer; mutated p53 tumor-suppressor gene indicating risk of various aggressive cancers; osteopontin expression levels indicating risk/presence of premalignant cells, and increased telomerase activity indicating a risk of cancers in the bladder, lung, or elsewhere). “Cancer progression” refers to event(s) indicative of, the transition of a normal, non-neoplastic cell to a cancerous, neoplastic cell, the migration of such neoplastic cells, and the formation and growth of tumors therefrom (tumor progression), including cell crisis, immortalization and/or normal apoptotic failure, proliferation of immortalized and/or pre-neoplastic cells, transformation (i.e., changes CBA immortalized cells exhibiting anchorage-independent, serum-independent and/or growth- factor independent, or contact inhibition-independent growth, aneuploidy, and focus formation), proliferation of transformed cells, development of metastatic potential, migration and metastasis (e.g., the disassociation of the cell from a location and relocation to another site), new colony formation, tumor formation, tumor growth, neotumorogenesis (formation of new tumors at a location distinguishable and not in contact with the source of the transformed cell(s)), and combinations thereof. Administration of CEPESCs comprising CAgES(s) to TR(s) in which any 1+ of such aspects of cancer progression is detected are AOTIs. Additional aspects of cancer progression are known and can be applied to such AOTI, such as those provided in US20070014788.

[1427] In aspects, CEPESCs comprising CAg(s) are administered to TR(s) at risk for cancer in which there is SMGAOA of (a) physical indicator(s) of cancer, e.g., palpable lumps, enlarged lymph nodes, bleeding, visible skin lesions, (b) indicators of cancer identified through imaging (X-ray techniques, mammography, colonoscopy, computed tomography (CT and/or CAT) scanning, magnetic resonance imaging (MRI), etc.); (c) indicators obtained through immunodiagnostic assays (e.g., detection of CEA, AFP, CA125, etc.) or antibody-mediated radioimaging; and (d) indicators obtained through cellular/tissue immunohistochemistry. In aspects, such indicator(s) include expression of oncogene(s), TAAs, or other CAg(s) (e.g., HER2, MAGE CAg(s), MUC1 CAg(s), TRAL CAg(s), and the like).

[1428] In aspects, delivery of CEPESC(s) reduces one or more aspect(s) of cancer progression. In cases, such aspects of cancer progression that are DOS reduce(d) include (1) rate of increase of precancer or cancer cells or markers thereof; (2) number or size of cancerous growths (lesions, tumors, and the like); (3) probability, timing, or degree of the next phase of cancer progression; (4) reduction of cancer metastasis or invasiveness; or (5) combinations. In aspects, treatment of cancer by such methods DOS results in reduction in the rate of tumor growth, cancer spread, or even reduction in tumor number, average tumor size, etc. In aspects, CE(s) related to such AOTI(s) comprise DOS prolonged survival, reduced risk of near-term fatality (e.g., in 1-5 years), reduction of symptoms associated with cancer (e.g., cancer-associated pain), improvement in quality of life, etc.

[1429] Cancers treated by such methods can include any of the various cancers DEH or otherwise known in the art. In aspects, methods comprise treating carcinoma(s) (e.g., adenocarcinoma, squamous cell carcinoma, or ductal cell carcinoma); sarcoma(s) (e.g., Ewing sarcoma); leukemia (e.g., AML, CML, CLL, SLL, or ALL); or lymphoma (e.g., NHL or DLBCL); or myeloma (e.g., multiple myeloma). Additional cancer(s) treatable or preventable by delivery of CEPESC(s) are described in references CEH (e.g., the '788 US application). In aspects, CEPESC(s) DOS treat solid tumor cancer(s) or non-tumor cancers, e.g., blood cancers or non-tumor-forming breast cancer. In aspects, CEPESC(s) treat a pathogen-associated cancer, e.g., an HPV-associated cancer.

[1430] In AOTI, CE(s) comprise DOS reducing the size of an established tumor or lesion in the subject (e.g., reducing size of a tumor or average size of tumor(s) by at least 20%, at least 30%, at least 50%, e.g., about 60-100%, about 75-100%, or about 85-100%). In AOTI, CEPESCs DOS enhance survival rate(s), survival time(s), or both, alone or AW CCEPM(s) or CCEPC(s) (e.g., increasing average survival time by least at least 3, 4, 6, 8, 9, 12, 18, 24, 30, 36, 42, 48, 54, or 60 months in TR(s) diagnosed with the relevant cancer).

[1431] In aspects, CEPESC(s) result in DOS detection of one or more predictive biomarker(s) for progression-free survival/overall survival in TR(s) treated for cancer. Examples of such biomarkers include DOS increase(s) in tumor-infiltrating lymphocyte (CD4+, CD8+) population(s), decreased neoantigen burden, decreased mutational load, reduced expression of oncogenes/CAg(s), and modifications of cancer-associated epigenetic signature(s), each of such being an AOTI.

[1432] In aspects, CEPESC(s) are used to treat a cancer is a relapsed or refractory cancer. In aspect(s), CEPESC(s) are delivered to an NHA TR that is associated with susceptibility to certain cancer(s) (e.g., golden retrievers/lymphoma, gray horses/melanoma, and other examples DEH). In aspects, CEPESCs are delivered to treat bladder cancer/TCC. In aspects, such methods are performed on humans or dogs. In aspects, CEPESC(s) comprising CAg(s) are delivered to treat lymphoma(s), e.g., in humans or in dogs. In aspects, such lymphomas are diagnosed as drug-resistant lymphoma(s) or the TR is a subject diagnosed as being of risk for developing drug-resistant lymphoma(s). In aspects, other anti-cancer agents, such as anti-cancer oncolytic virus(es) are administered in association with CEPESC(s).

[1433] In aspects, CEPESC(s) are used to treat a cancer CB immunologically hot tumors (CB relatively high amount(s) of effector IC infiltration, e.g., in a melanoma, lung cancer, head and neck cancer, etc.). In aspects, CEPESC(s) are delivered to TR(s) with a cancer CB cold tumors. In aspects, IR(s) AW delivery of CEPESC(s) include DOS initiation of TC anti-tumor IR(s), migration of IC(s) to tumor(s) (e.g., TCs, DCs, NKCs, or combinations), increased numbers of CD8 TCs (or higher ratio of CTLs/naïve CD8 TCs); and the like. In aspects, IR(s) AW CEPESC(s) comprise DOS maturation of DCs (e.g., in response to CAgES CEPESC(s) or other CEPESC(s) DEH). In aspects, CEPESCs comprise cytokine(s) or CCC(s)/CCEPC(s) comprise cytokine(s) or cytokine-expressing vectors/nucleic acid(s).

[1434] In aspects, such methods are AAW other anti-cancer therapeutic(s), e.g., chemotherapy CCEPC(s) (e.g., doxorubicin) or radiation CCEPM(s). In aspects, anti-cancer methods OTI comprise AAW anti-cancer antibodies, such as checkpoint inhibitor Abs (e.g., anti-CTLA4, anti-PD-L1, anti-PD-1, anti-IDO, anti-IDO1, anti-CD200, anti-CD137, anti-KIR2D); cytokine(s) (e.g., IL-2 or IFNa), and the like (SFE Christofi T et al. Cancers (Basel). 2019; 11(10):1472. doi:10.3390/cancers11101472). Other combinations adaptable to methods are described specifically below and in connection with CCCs & omethods DEH.

[1435] In aspects, anti-cancer CEPESCs comprise neoantigen(s) (e.g., shared neoantigen(s)) or CCC(s)/CCEPC(s) comprise delivery of such antigen(s) (such as those disclosured in US20190307868 or DEH). In aspects, CAg(s) in CEPs or AAW CEPESC(s) comprise synthetic long peptide (SLP) neoantigens (Hollingsworth R E et al. NPJ Vaccines. 2019; 4:7. doi:10.1038/s41541-019-0103-y). In other aspect(s), CEPESC(s) are administered AAW deliver of a chimeric antigen receptor-engineered T cell therapy (CAR-T) targeting cancer targets (e.g., in treatment of ALL, CLL, or B-cell lymphoma). In aspects, CEPESCs, CAg(s), or both are delivered in DCs or CEPESCs are delivered in or with CAg-pulsed DCs (e.g., neoantigen pulsed DCs) or DCs transformed to express higher than typical levels of cytokines, e.g., IL-2, GM-CSF, or CT.

[1436] In AOTI, anti-cancer CEPESC(s) comprise internal CAg(s). In aspects, SMGAOA of CAg(s) in CEP(s) are internal CAg(s). Such Ags are described in Wang Y et al. Mol Oncol. 2015; 9(10):1982-1993. doi:10.1016/j.molonc.2015.10.019; Trenevska I, et al. Front Immunol. 2017; 8:1001. doi:10.3389/fimmu.2017.01001; and Hong C W et al. FEBS Lett. 2014; 588(2):350-355. doi:10.1016/j.febslet.2013.10.025 & such disclosures can be adapted to cancer treatment/prevention AOTI & composition AOTI.

[1437] In aspects, CEPESCs comprise or CCs/CCEPCs comprise FPs, such as anti-DC ICR Ab/TAA FPs. In aspects, CEPESCs comprise oncolytic viruses (e.g., recombinant oncolytic viruses, e.g., oncolytic viruses expressing cytokine(s), e.g., GM-CSF; PCM(s) (e.g., CD40L), or other IMs/adjuvant(s), such as bacterial proteins, such as HPNAP PPTs).

[1438] In aspects, CC(s)/CCEPC(s) comprise CAR-T cells, e.g., CAR-T cells targeting CD19 (in aspects, such combinations are used to treat leukemia, lymphoma, or myeloma, such as B cell lymphomas or multiple myeloma). CAR-T cells also can target HER2 or IL13R (in glioblastoma treatment) or PSMA or PSCA (e.g., in prostate cancer treatment). In aspects, CC(s)/CCEPC(s) comprise inhibitor CAR (iCAR)/activating CAR T cells, which provide negative signals when Ags are recognized on normal cells but not when they are recognized on cancer cells (e.g., CD19-CAR carrying activating signaling (CD3 and CD28) and PSMA-CAR carrying inhibitory signaling domains (from PD-1 or CTLA-4)). In aspects, CAR-T cells comprise suicide genes to eliminate the cells in the event a toxic AE arises (e.g., by incorporation of HSV-thymidine kinase (HSV-TK) or inducible-caspase-9 (iCasp9)).

[1439] In aspects, CC(s)/CCEPC(s) or CEP(s) comprise anti-angiogenic PPTs/agents, such as anti-VEGF or anti-VEGFR Abs or inhibitors (e.g., small molecule kinase inhibitors of VEGFR). In aspects, CC(s)/CCEPC(s)/CEP(s) comprise endothelial cell IR modulators, such as Fas ligand-blocking PPTs/agents. In aspects, CC(s)/CCEPC(s)/CEP(s) comprise TNF-related apoptosis-inducing ligand (TRAIL) ligand PPTs or modulators thereof. In aspects, CC(s)/CCEPC(s)/CEP(s) comprise FAP PPTs or modulators. In aspects, use of such agent(s) as described herein DOS reduce tumor growth or support (e.g., by inducing IR(s) in tumor-associated fibroblast(s), stromal cell(s), and the like). Related AOTI directed to induction of IR(s) in such cells is DEH. Such AOTI can be relevant in cancers in which the relative proportion of malignant cells in tumors is relatively low, as is often the case in cancers. In aspects, CC(s)/CCEPC(s)/CEP(s) comprise PPTs/agents that block TC suppressive cytokine(s), e.g., IL-4, IL-10 and TGFb.

[1440] In aspects, CCEPC(s)/CC(s) comprise delivery of agents that selectively silence cancer-related genes/PPTs in cancer cells, such as siRNA, antisense, CRISPR-Cas9 mediated silencing of such factors (e.g., silencing of PD-L1 on tumor cells (e.g., clinical trial agents NCT02793856, NCT02863913). In aspects, other anti-cancer siRNA, CRISPR, or antisense compositions are delivered as CCEPC(s)/CC(s), e.g., antisense oligonucleotides or siRNA that reduce the expression of oncogenes or other cancer progression-related genes (SFE US Patent Application 2003224993 and O'Toole et al., Exp Cell Res. 1997 Jun. 15; 233(2):330-9; and Giles et al., J Cell Sci. 2001 August; 114(Pt 16):2967-76)). In aspects, CC(s)/CCEPC(s) comprise anti-cancer aptamers. Such agents are described in, e.g., Kim M et al. Molecules. 2018; 23(4):830. doi:10.3390/molecules23040830 and Morita Y, et al. Cancers (Basel). 2018; 10(3):80. doi:10.3390/cancers10030080.

[1441] In aspects, CC(s)/CCEPC(s) comprise anti-cancer Abs, such as Herceptin, cetuximab, (REMICADE®), and adalimumab (HUMIRA™), anti-CD94/NKG2A antibodies (see, for example, U.S. 20030095965), and Anti-kir antibodies (US20150344576).

[1442] In aspects, CC(s)/CCEPC(s)/CEP(s) comprise gut microbial/non-microbial ligands. In aspects, such ligands induce DOS adaptive IRs to pathogens, cancer, or both. In aspects, CC(s)/CCEPC(s) comprise immunomodulatory metabolites, such as short-chain fatty acids (e.g., butyrate, acetate, & propionate) or secondary bile acids. In aspects, CC(s)/CCEPC(s) comprise commensals such as Bacteroides, Lactobacillus, & Bifidobacteria.

[1443] In aspects, CCEPM(s) comprise anti-cancer surgery, bone marrow transplant, or application of anti-cancer radiotherapy (e.g., external beam radiation therapy (EBRT) or brachytherapy (BT)), or both. Cytotoxic radiotherapy can comprise application of suitable radioactive isotopes (e.g., At²¹¹, I¹³¹, I₁₂₅, Y⁹⁰, Re¹⁸⁶, Re¹⁸⁸, Sm¹⁵³, B²¹², Ra²²³, P³², and radioactive isotopes of Lu).

[1444] In aspects, CC(s)/CCEPC(s) comprise chemotherapeutic agent(s) (e.g., antitumor agents such as doxorubicin, paclitaxol, a cyclophosphamide, etoposide, 5-fluorouracil, methotrexate, and the like). In aspects, such agents are alkylating agents, antimetabolites, cytotoxic antibiotics, hormonal agents (e.g., anti-estrogens, other anti-androgens) other aromatase inhibitors, and other progestogens. In aspects, such agents are ell cycle control/apoptosis agents, growth factor inhibitors, angiogenesis inhibitors, or vinca alkaloids. Exemplary chemotherapeutic agents for combined therapy are listed in Table C of U.S. Pat. No. 6,524,583. In aspects, chemotherapeutic agent CC(s)/CCEPC(s) comprise alkyl sulfonates, aziridines, nitrogen mustards, nitrosureas, mitomycins, anti-metabolites (e.g., methotrexate and 5-fluorouracil (5-FU)), folic acid analogues, pyrimidine analogs, androgens, maytansinoids, platinum analogs, retinoids (e.g., ATRA, Targretin, 9-cis RA, alone or in combination with DNA methyltransferase or histone deacetylase inhibitors), or combinations, e.g., CHOP (combined therapy of cyclophosphamide, doxorubicin, vincristine, and prednisolone) and FOLFOX. In aspects, chemotherapeutic agents comprise cytotoxic agent(s), such as maytansinoids, taxol, cytochalasin B, gramicidin D, methotrexate, doxorubicin, melphalan, chlorambucil, daunorubicin or other intercalating agents, nucleolytic enzymes, benzodiazepine, and toxins (e.g., bacterial toxins).

[1445] In aspects, CC(s)/CCEPC(s) comprise prodrugs of anti-cancer agents, such as chemotherapeutic agents (SFE Wilman, “Prodrugs in Cancer Chemotherapy” Biochemical Society Transactions, 14, pp. 375-382, 615th Meeting Belfast (1986)).

[1446] In aspects, CC(s)/CCEPC(s) comprise chemotherapeutic conjugates, e.g., PPT-chemotherapeutic derivatives. E.g., such compounds can comprise an Ab derivative comprising an Fc portion and a chemotherapeutic agent.

[1447] In aspects, CC(s)/CCEPC(s) comprise 1+ Btk inhibitors, TEC inhibitors, Itk inhibitors, PD-L2 Inhibitors, PD-1 inhibitors, CTLA-4 Inhibitors, CD 137 Inhibitors, PS Inhibitors, CD52 Inhibitors, CD30 Inhibitors, CD20 Inhibitors, CD27 Inhibitors, ICOS Inhibitors, or other immunomodulators/anti-cancer agents described in WO2016161347.

[1448] As described in WO2017053823, agent(s) effective for the specific cancer(s) targeted by CEPESCs and methods OTI are known. E.g., CCCs/CCEPCs for bladder cancer treatment comprise doxorubicin hydrochloride (Adriamycin PFS/RDF), cisplatin, mitomycin, fluorouracil, gemcitabine, methotrexate, vinblastine, carboplatin, paclitaxel, docetaxel, thiotepa (Thioplex, Tepadina), immunotherapeutic agents (e.g. Bacille Calmette-Guerin, interferon alfa-2b), and radiation therapeutic agents.

[1449] Additional anti-neoplastic agents that can be used in the combination composition and combination administration methods of the invention include those described in, e.g., WO2019071123, WO2019079297, US2019029068, US20190152949, US20200017471, US20200016250, WO 2003070921, and Ramachandran M et al. Semin Cancer Bio. 2017; 45:23-35. doi:10.1016/j.semcancer.2017.02.010.

[1450] Any aspect of anti-cancer methods & CEPESCs described here that can be applied to anti-pathogen compositions & methods can be and vice versa.

### ILLUSTRATIVE APPLICATIONS (EXAMPLES)

[1451] To even further exemplify and illuminate aspects of the invention, the following description of illustrative applications of particular aspects of the invention are provided. These Examples are meant to exemplify particular facets of the invention but should not be used to limit its scope whatsoever.

### I. General Methods

[1452] Methods described herein are known to those of skill in the art, but exemplary applications of such methods or brief descriptions thereof are provided in the following passages or references cited therein.

[1453] Many of the Examples provided herein comprise the isolation and use of peripheral blood mononuclear cells (PBMCs—sometimes also referred to as PBMC), isolation of immune cells from PMBCs, and flow cytometry or other types of analysis of such cells. Many PBMC isolation methods, methods for obtaining immune system cells from PBMC, flow cytometry and other analytical methods are known in the art (SFE Grievink H W, Luisman T, Kluft C, Moerland M, Malone K E. Comparison of Three Isolation Techniques for Human Peripheral Blood Mononuclear Cells: Cell Recovery and Viability, Population Composition, and Cell Functionality. Biopreserv Biobank. 2016; 14(5):410-415. doi:10.1089/bio.2015.0104; Riedhammer C, Halbritter D, Weissert R. Peripheral Blood Mononuclear Cells: Isolation, Freezing, Thawing, and Culture. Methods Mol Biol. 2016; 1304:53-61. doi:10.1007/7651_2014_99; Raulf-Heimsoth M. T cell—primary culture from peripheral blood. Methods Mol Med. 2008; 138:17-30. doi:10.1007/978-1-59745-366-0_2; Rahmoune H, Guest PC. Studies of Isolated Peripheral Blood Cells as a Model of Immune Dysfunction. Methods Mol Biol. 2018; 1735:221-229. doi:10.1007/978-1-4939-7614-0_12; Gerner W, Käser T, Pintaric M, Groiss S, Saalmuller A. Detection of intracellular antigens in porcine PBMC by flow cytometry: A comparison of fixation and permeabilisation reagents. Vet Immunol Immunopathol. 2008; 121(3-4):251-259. doi:10.1016/j.vetimm.2007.09.019; Yancy H, Ayers S L, Farrell D E, Day A, Myers M J. Differential cytokine mRNA expression in swine whole blood and peripheral blood mononuclear cell cultures. Vet Immunol Immunopathol. 2001; 79(1-2):41-52. doi:10.1016/s0165-2427(01)00247-1; Piriou L, et al. Cytometry. 2000; 41(4):289-297. doi:10.1002/1097-0320(20001201)41:4<289::aid-cyto7≥3.0.co; 2-5; Summerfield A et al. Immunology. 2003; 110(4):440-449. doi:10.1111/j.1365-2567.2003.01755.x; and Berg C, Wilker S, Roider J, Klettner A. Vet Res Commun. 2013; 37(3):239-241. doi:10.1007/s11259-013-9566-x.

[1454] Methods of TCE identification employed in this analysis can include techniques described in, e.g., Stevenson, P. G., and Doherty, P. C. 1998. Cell-mediated immune response to influenza virus. In Nicholson, K. G., Webster, R. G., and Hay, A. J., eds., Textbook of Influenza, pp. 278-287. Blackwell Science, Oxford and Klausman, PCV-induced T cell clonal deletion in thymus, Emerging Microbes and Infections (2015) 4, e15; doi:10.1038/emi.2015.15.

### II. Example 1—PCV

[1455] In this example, the test subjects are pigs and antigenic sequences encoding antigenic sequences known or predicted to induce immune responses against porcine circovirus type 2 (referred to as PCV2 or PCV-2) are used to test constructs and methods of exemplary aspects of this invention. As is known in the art, PCV2 is a small DNA virus with a circular genome of approximately 1700 bp, encoding four Open Reading Frames (ORF1, ORF2, ORF3, and ORF4). T cell epitope analysis of these sequences is performed using methods described in this Section of the disclosure, which may be optionally supplemented by other methods, examples of which are provided in the Detailed Description Section of the disclosure.

[1456] Porcine dendritic cells, T cells, and B cells are isolated from porcine PBMCs. Human embryonic kidney cells (HEK293 cells, well known in the art and available through several public sources), Vero cells, and canine thymus cells are obtained to use as controls.

[1457] Synthetic peptide panels from PCV2 ORF expression products (including whole ORF expression products) are generated and used to query PBMC from PCV2 infected pigs to identify potential CRAs. These synthetic peptides are used in expression library immunization (ELI) methods employing sets of the synthetic peptides representing portions of the PCV2 genome.

[1458] ELI is generally understood as the use of an expression library constructed from the complete or partial DNA complement of a pathogen to immunize a host, typically without the risk of infection (SFE Barry, M. A., Lai, W. C. and Johnston, S A (1995) Nature (London) 377, 632-635). Examples of ELI methods are described in, e.g., Talaat A M, Stemke-Hale K. Expression library immunization: a road map for discovery of vaccines against infectious diseases. Infect Immun. 2005; 73(11):7089-7098. doi:10.1128/IAI.73.11.7089-7098.2005; Barry M A, Howell D P, Andersson H A, Chen J L, Singh R A. Expression library immunization to discover and improve vaccine antigens. Immunol Rev. 2004; 199:68-83. doi:10.1111/j.0105-2896.2004.00143.x; doi:10.1128/IAI.73.11.7089-7098.2005; and Lacasta A, Ballester M, Monteagudo P L, et al. Expression library immunization can confer protection against lethal challenge with African swine fever virus. J Virol. 2014; 88(22):13322-13332. doi:10.1128/JVI.01893-14. Panels of synthetic overlapping peptides representing ORFs 1,2,3 and 4 are used to query PBMC from naturally infected pigs to identify T cell targets. PCV2 and PCV3 have very small genomes so ELI is feasible for CRA screening. In some cases, CRAs are modified to generate putative editopes; e.g., putative editopes can be generated by preparing nucleotide sequences encoding antigenic variants edited for de-glycosylation, a removal method known to enhance immunogenicity to PCV and other viruses.

[1459] Any clinically relevant antigens identified through the ELI step are then sequenced, nucleic acids encoding the CRA(s) are prepared or isolated from PCV2, and CRA-containing construct(s) are generated in a similar manner to the two specific constructs described below in this Example. It is anticipated that one or more polyepitope-encoding DNA sequences will be generated from the ELI screen and expression of PCV2 ORFs or portions thereof.

[1460] The antigen-encoding sequences identified in the ELI screen are cloned into suitable plasmid vectors, in association with one or more gD-domain-encoding sequences to express a gD:antigen fusion protein and/or independently. In gD:antigen fusion protein-encoding constructs, the antigen-encoding sequences are positioned between nucleotide sequences encoding (1) a first gD sequence comprising residues 23-244/267 of HSV-1 gD (gD1 seq 1) and (2) a second gD amino acid sequence that comprises residues 245/268-340/392 of HSV-1 gD-1 (gD1 seq 2). A sequence encoding SEQ ID NO: 1 (a polyubiquitin chain) is optionally positioned upstream of gD-1 sequence 1 in the fusion protein coding nucleotide sequence. Also or alternatively, the fusion protein can include a T2A cleavage site, such as a single T2A site downstream of gD1 seq 2. In a possible variation or extension of this plan, one or more sequences encoding variants of an above-described gD1 seq 1 sequence in which residues associated with HVEM binding and that do not impact binding to Nectin-1 and homologous receptors are removed and also used in separate constructs or replace gD1 seq 1 in the experimental plan.

[1461] In addition to sequences encoding CRAs identified in the above-referenced step, a sequence encoding the glycosylation site removal editope, ORF2A143-145, also is prepared, for insertion into plasmid vectors.

[1462] Such plasmid vectors will likely include an expression-enhancing intron, such as a CMV Intron A sequence, and a strong constitutive promoter, such as a CMV IE promoter. The plasmids will further likely comprise a reporter gene (e.g., a GFP sequence) and a non-antibiotic resistance system, such as a triclosan selection system described elsewhere herein. Cloning of plasmid containing cells can then be performed on triclosan media. The method can also comprise confirming reporter gene expression in culture to ensure proper levels of expression are occurring in vitro, in vivo, or both.

[1463] Isolated DNA plasmids are mixed with calcium phosphate nanoparticles using methods described in the Detailed Description of the Invention to form DNA:CaPNP complexes prior to vaccination of test subjects. Such vaccination is administered intranasally. Constructs to be tested in healthy animals (which will be subsequently assessed for PCV2 protection or challenged with PCV2) or PCV2-infected animals will include the following coding sequences: (a) gD1 seq 1:PCV2 CRA:gD1 seq 2 (e.g., SEQ ID NO: 1-gD seq 1-PCV2 CRA-gD seq 2-T2A SCS); (b) gD1 seq 1: ORF2A143-145 gD1 seq 2; (c) ORF2A143-145; and (d) PCV2 CRA.

[1464] In some cases, nucleotide sequences encoding one or more known or putative B cell epitopes from PCV2 ORF2 (which encodes the PCV2 capsid protein) are also (1) incorporated directly or indirectly (via cleavage site or linker) to the fusion protein-coding sequence, (2) separately expressed from the fusion protein-encoding nucleotide sequence-containing DNA plasmid (e.g., as a bicistronic plasmid), or encoded in a separate DNA plasmid that is administered with or in association with the fusion-protein-encoding sequence containing DNA plasmid. Examples of relevant putative epitopes are described in, e.g., Guo L, Lu Y, Huang L, Wei Y, Liu C. Identification of a new antigen epitope in the nuclear localization signal region of porcine circovirus type 2 capsid protein. Intervirology. 2011; 54(3):156-163. doi:10.1159/000319838 and Shuai J, Wei W, Li X, et al. Genetic characterization of porcine circovirus type 2 (PCV2) from pigs in high-seroprevalence areas in southeastern China. Virus Genes. 2007; 35(3):619-627. doi:10.1007/s11262-007-0121-0, as well as in Chinese Patent Applications CN110423269A and CN110407919A. Alternatively, endogenous humoral responses to selected putative vaccine antigens in chronically infected pigs can be used to identify antigens that result in a sufficient humoral response by collecting serum and evaluating by virus neutralization against selected PCV strains e.g., PCV2a/b or PCV2d. Alternatively, ELISA can be performed using these sera and purchased or synthetic antigens (e.g., ORF2 at a minimum).

[1465] In addition, nucleotide sequences encoding a PD-L1 antagonist (e.g., a PD-L1 trap protein as described in the Detailed Description or a PD-L1 sequence obtained based on the disclosure of Richmond O, Cecere T E, Erdogan E, et al. PD-L1 expression is increased in monocyte derived dendritic cells in response to porcine circovirus type 2 and porcine reproductive and respiratory syndrome virus infections. Vet Immunol Immunopathol. 2015; 168(1-2):24-29. doi:10.1016/j.vetimm.2015.09.013) and an EAT-2 polypeptide (e.g., human, murine or porcine EAT-2, also as described in the Detailed Description) are obtained and either cloned into the same DNA plasmid vector as the above-referenced antigen-encoding sequences or into a separate expressible CaPNP-complexed DNA plasmid vector that it is co-administered with the above-described antigen sequence-encoding DNA plasmids (in at least some cases), such that the test subjects receive the following sequences in administered DNA plasmid(s): (a) gD1 seq 1:PCV2 CRA:gD1 seq 2; (b) gD1 seq 1:PCV2 CRA: gD1 seq 2+ EAT-2; (c) gD1 seq 1:PCV2 CRA:gD1 seq 2+PD-L1 antagonist (PD-L1a); (d) gD1 sequence 1:PCV2 CRA:gD1 sequence 2+PD-L1a+EA; (e) EAT-2; (f) PCV2 CRA; (g) PCV2 CRA+ EAT-2; (h) PCV2 CRA+PD-L1a; (i) PCV2 CRA+PD-L1a+ EAT-2; (j) gD1 seq 1: ORF2A143-145:gD1 seq 2; (k) gD1 seq 1: ORF2A143-145:gD1 seq 2+ EAT-2; (1) gD1 seq 1: ORF2A143-145:gD1 seq 2+PD-L1a; (m) gD1 seq 1: ORF2A143-145:gD1 seq 2+PD-L1a+ EAT-2; (n) ORF2A143-145; (o) ORF2A143-145+ EAT-2; (p) ORF2A143-145+PD-L1a+ BCEs; and (q) ORF2A143-145+PD-L1a+ EAT-2+ BCEs

[1466] Alternative versions of constructs that can be generated and tested from identified T cell antigen-encoding sequences are: (i) gD-singleORF (fragment or native); (ii) gD-multiORF (fragments of more than one PCV-ORF; (iii) gD-Editope (e.g., native antigen or fragment with glycosylation site(s) deleted); (iv) singleORF (fragment or native); (v) multiORF (fragments of more than one ORF) or (vi) GSRAgV/editope (e.g., native Ag or fragment with glycosylation site(s) deleted).

[1467] The method can further include generation of mixtures of two or more of these types of construct-containing plasmids either in the first instance or in further iterations of the experimental method.

[1468] Endotoxin-free gigapreps are prepared for clinical studies (e.g., using GenElute™ HP Endotoxin-Free Plasmid Megaprep Kit—Millipore Sigma, St. Louis, Mo., USA) comprising 7-10 mg of each candidate (an amount sufficient for pilot safety/challenge study) & formulated appropriately.

[1469] Each of the above-described treatments are provided to a group of at least 5 pigs per group. The plasmid compositions are delivered by mucosal administration of 1-2 mL of a formulation for vaccination comprising 1-200 micrograms of plasmid. Single vaccination will be employed in this study (but repeat administration can be used, e.g., one or two doses administered every 2-8 weeks). A vaccination trial is expected to include a safety phase to assess safety of the constructs for a suitable period, such as 7 days. Viral challenge is expected to take place at three to six weeks after administration. Viral challenge may be repeated with different stains of PCV-2, in order to identify constructs that are protective against a number of PCV types. Candidate strains for the challenge study can include some or all of the following—

1. PCV2d isolate JX535296 Opriessnig 2017, GenBank accession numbers JX679498 and JQ653449; Opriessnig 2014 J Gen Virol (Opriessnig T, Xiao C T, Gerber P F, Halbur P G, Matzinger S R, and Meng X J. J Gen Virol. 2014; 95(Pt 11):2495-2503. doi:10.1099/vir.0.066423-0);
2. PCV2 strain GDYX deposited in GenBank under the accession number JX519293; Chen et al 2012 J Virol (Chen F, Pan Y, Liao C, et al. J Virol. 2012; 86(22):12457-12458. doi:10.1128/JVI.02290-12); and
3. PCV2 Isolate D3276/5/16HU; (GenBank accession number: MG833033; Palya et al 2018 Virol J (Palya V et al. Virol J. 2018; 15(1):185. doi:10.1186/s12985-018-1098-0).

[1470] In a possible variation of the above-described method, PCV3 antigenic sequences are also or alternatively included in the test constructs (e.g., where a broader PCV/Circovirus vaccine is sought or to employ similar principles for the development of a PCV3 vaccine comprising such a construct but with one or more PCV3 CRAs). Candidate strains that also or additionally can be used for such a PCV3 or combined PCV vaccine study include:

1. PCV3/CN/Hubei-618/2016 deposited at GenBank under the accession number KY354039; Fan et. al. Genome Announc. 2017 (Fan S, Ku X, Chen F, Wang Y, Yu X, He Q. Genome Announc. 2017; 5(15):e00100-17. Published 2017 Apr. 13. doi:10.1128/genomeA.00100-17);
2. GenBank Accession Number KX458235; Palinski et. al. J. Virol. 2016 (Palinski, R., Pineyro, P., Shang, P., Yuan, F., Guo, R., Fang, Y., Byers, E. and Hause, B. M. J. Virol. 91(1) (2016) PUBMED 27795441);
3. GenBank Accession Number KY996344; Kwon et. al. Vet. Microbiol. 2017 (Kwon, T., Yoo, S. J., Park, C. K. and Lyoo, Y. S. Vet. Microbiol. 207, 178-180 (2017) PUBMED 28757021); &
4. GenBank Accession Number MG014362; Fux, et. al. Virol J. 2018 (Robert Fux, Christina Söckler, Ellen Kathrin Link, Christine Renken, Roman Krejci, Gerd Sutter, Mathias Ritzmann, Matthias Eddicks. Full genome characterization of porcine circovirus type 3 isolates reveals the existence of two distinct groups of virus strains. Virol J. 2018; 15: 25. Published online 2018 Jan. 29. doi: 10.1186/s12985-018-0929-3).

[1471] PBMC are harvested at −7, 0, 7, 14, 21, 42 and optionally 56 days. PBMC will be analyzed by flow cytometry for CD4+, CD8+, NK cell, dendritic cell, gamma-delta T cell and regulatory T cell responses to vaccine antigens, or alternatively analyzed by analytical methods capable of producing similar or equivalent data, such as ELISpot analysis. Serum is collected at days 14, 21, and 42 and is used to measure antibody responses.

[1472] A third, challenge phase can further be conducted, with timing, strain selection and sample collection protocols to be determined. The performance of the vaccine candidates will be compared to at least one commercial PCV vaccine.

[1473] It is expected that several of the plasmids/constructs described above will result in a measurable and often significant B cell and T cell response to PCV, and that at least some of the constructs/plasmids will result in significant B cell and T cell responses to more than one type of PCV.

### III. Example 2—PRRSV

[1474] In this example, nucleotide sequences encoding gD1 seq 1 and/or gD1 seq 2 and an intervening PRRSV antigenic sequence are prepared and inserted into a DNA plasmid, which may comprise sequences encoding a ubiquitin (e.g., SEQ ID NO: 1) (typically positioned upstream of the antigen (for example, if gD is located at the C terminus) or gD seq 1), a T2A cleavage site (typically positioned downstream of gD1 seq 2), or both, and optionally including a CMV Intron A sequence and a strong constitutive promoter, such as CMV IE. The DNA plasmids are associated with CaPNP particles and formulations are administered to pigs using treatment and analytical approaches described in Example 1 (e.g., flow cytometric or ELISpot analysis of PBMC drawn and ELISA analysis of sera collected on the days indicated in Example 1). The three antigenic sequences tested both on their own and in the context of the gD1 seq 1-gD1 seq 2 fusion protein are—

PRRSV ORF native
(SEQ ID NO: 11)
>AAO13194.1 envelope glycoprotein GP3 PRRSV
MVNSCTFLHIFLCCSFLYSFCCAVVAGS [symbol] YCFWFPLVRGNFSFEL
TVNYTVCPPCLTRQAATEIYEPGRSLWCRIGYDRCGEDDHDELGFMI
PPGLSSEGHLTSVYAWLAFLSFSYTAQFHPEIFGIGNVSRVYVDIKH
QLICAEHDGQNTTLPRHDNISAVFQTYYQHQVDGGNWFHLEWLRPFF
SSWLVLNVSWFLRRSPANHVSVRVLQILRPTPPQRQALLSSKTSVAL
GIATRPLRRFAKSLSAVRR

[1475] The nucleotide sequence encoding the native PRRSV ORF3 sequence shown above (SEQ ID NO: 11) will be modified to generate a variant antigenic sequence in which one or more of the native putative glycosylation sites (shown in italics in SEQ ID NO: 11, above) will be removed through N to D residue substitutions (underlined and bolded), as reflected in SEQ ID NO: 12,

PRRSV ORF3 edited native
(SEQ ID NO: 12)
Edited envelope glycoprotein GP3 [PRRSV]
MVNSCTFLHIFLCCSFLYSFCCAVVAGSDTTYCFWFPLVRGDFSFE
LTVDYTVCPPCLTRQAATEIYEPGRSLWCRIGYDRCGEDDHDELGF
MIPPGLSSEGHLTSVYAWLAFLSFSYTAQFHPEIFGIGDVSRVYVD
IKHQLICAEHDGQDTTLPRHDDISAVFQTYYQHQVDGGNWFHLEWL
RPFFSSWLVLDVSWFLRRSPANHVSVRVLQILRPTPPQRQALLSSK
TSVALGIATRPLRRFAKSLSAVRR

[1476] A NS encoding a truncated version of SEQ ID NO:12 (limited to AAs 1-100 thereof) (SEQ ID NO: 13) will also be generated and inserted into either a gD1 seq 1:gD1 seq 2 construct or a non-gD construct, as shown below—

PRRSV ORF3 edited/truncated
(SEQ ID NO: 13)
Truncated edited envelope glycoprotein GP3
sequence [PRRSV]
MVNSCTFLHIFLCCSFLYSFCCAVVAGSDTTYCFWFPLVRGDFSFE
LTVDYTVCPPCLTRQAATEIYEPGRSLWCRIGYDRCGEDDHDELGF
MIPPGLSS

[1477] As described in Example 1, these constructs can further be combined with sequences encoding either PD-1, PD-1 extracellular binding domain, PD-L1 extracellular binding domain, or EAT-2.

[1478] It is expected that one or more of the constructs will result in a significant level of B cell and T cell response against PRRSV.

### IV. Example 3—ASFV CRA SCREENING

[1479] This Example provides an overview of a screening method to identify clinically relevant antigens (CRAs) in African Swine Fever Virus (ASFV), to incorporate nucleotide sequences encoding such CRAs into a gD:antigen fusion protein-encoding construct, such as a gD1 seq 1/gD1 seq 2 construct as described in Example 1, which is in turn incorporated into a suitable plasmid DNA vector delivery system and administered to pigs in a trial to assess the suitability of the CRAs in the context of a gDAgFP expression system.

[1480] Antigens that elicit CTL responses and are expressed during the early stage of ASFV infection will be identified, fused to a gD sequence and incorporated into a DNA vaccine. Because of ASF handling restrictions, the goal is achieved in several steps, beginning with identification of viral antigens that are present at very early stages of infection and that elicit a CTL response to vaccination of healthy pigs. Fusion of these viral antigens to gD sequences and expression optionally with a checkpoint inhibitor (e.g., a PD-L1 antagonist), especially in the context of a co-expressed innate adaptive immunity immunomodulator, such as EAT-2, will boost the adaptive response by enhancing viral antigen T cell recognition, T cell proliferation and T cell memory to elicit a rapid and effective T cell response at the earliest stages of ASFV primary infection upon viral entry into host cells.

[1481] Viral particles carry antigens that are introduced into infected cells early, even though expressed at the late, post-replication stage of viral infection. Therefore, late, immediate early, early and intermediate ORFs will be included in the screen. To stimulate an innate NK cell response to vaccination, a separate plasmid will be constructed that encodes an EAT-2 polypeptide to in turn enhance the adaptive processes of APC maturation, proliferation and T cell effector and memory responses to vaccine antigens. Pools of antigens will be formulated in a CaPNP delivery system, as described above. All plasmids will be amplified via an antibiotic resistance gene-free triclosan selection system.

[1482] Safety and immunogenicity of the designed CaPNP-formulated plasmid pool vaccine will be assessed in an animal trial: Pigs will receive a combined intranasal/intramuscular prime/boost vaccination at 4 and 6 weeks of age. On a weekly basis, blood will be collected to isolate and store serum and PBMC. Serum will be used in future neutralizing antibody studies. PBMC will be used to analyze the plasmid pool-induced systemic cellular immune response: Upon in vitro re-stimulation with the vaccine antigen pool, the proliferation, cytokine and perforin production, memory cell generation and homing pattern of CD4+ T cells, CTLs, TCR-γδ T cells, and NK cells by multi-color flow cytometry will be studied. At the day of the highest immune response, the response to the four individual antigen pools will be tested. Antigens presented as gD fusions are expected to generate robust CTL responses to all or almost all of the antigens in vaccinated pigs. Including NK cell biomarkers in the analysis is intended to measure effects of innate immune stimulation by the EAT-2-expressing second, co-administered DNA plasmid. This will be the first comprehensive flow cytometry evaluation of the T- and NK cell response to such a combination of a gD:antigen fusion protein and innate adaptive immunity immunomodulator.

[1483] Genomes of more than 39 strains of ASFV have been sequenced and are available at GenBank. Based on published work and database analyses, all early and immediate early genes independent of their biological function and intermediate and late genes critical for replication and spread will be identified. It is expected that at least 50-60 highly conserved genes will be selected based on what is known about ASFV biology. Amino acid sequences for each gene selected for vaccination will be aligned and compared among all strains for which sequences are available. This will allow identifying amino acid substitutions, if any, that are naturally occurring and whether regions or domains where variation is observed have any potential T cell epitopes. If significant variation is observed for a given gene, a sequence that is most likely to yield a T-cell response will be selected. Established gene synthesis and molecular biology techniques are readily available in laboratory manuals, on the internet, and from vendors (PCR, gene synthesis, restriction digestion, agarose electrophoresis, ligation, E. coli transformation, selection of resistant colonies, miniprep DNA preparations, sequencing with primers, and megaprep DNA preparation) and commercially available reagents (enzymes, reagents, kits for cloning and DNA preparations from NEB, ThermoFisher, IDT, and Qiagen). Full-length nucleotide sequences of selected genes (Genescript) and clone into plasmid vector pMBF116 or a similar vector containing sequences for a CMV IE promoter—CMV Intron A—gD-expressing sequences for gD1 seq 1 (or a variant thereof with reduced HVEM binding as described above) and/or gD1 seq 2—and suitable reporter elements/tags (e.g., an epitope tag, a GFP reporter gene, or both) will be synthesized. The plasmid also carries the FabI gene for triclosan non-antibiotic selection and plasmid amplification. The ASFV genes will have 11 amino acids of HSV epitope tag (QPELAPEDPED (SEQ ID NO: 119)) at the C-terminus. Optional additional features such as a 2A cleavage site, a ubiquitin PTPS-encoding sequence, or both can also be added to the construct in this or later iterations of the experiment.

[1484] All plasmids made will be confirmed by DNA sequencing (Functional Biosciences, Madison, Wis., USA). Endotoxin-free DNA preparations will then be made (Qiagen EndoFree Plasmid Kit). Optionally, In-Cell Western Assay is also or alternatively used to confirm protein expression in which cells in 96-well plates are transfected, fixed to the plate and immunostained with a fluorescently tagged antibody (epitope tag) and scanned with an automated fluorescence microscope.

[1485] Equal amounts of at least 50-60 plasmids will be pooled (25 μg/plasmid) and formulated with CaPNP (Southwest Research Institute, San Antonio Tex.) in PBS. DNA loading will be precisely quantified. For some experimental groups, the pool will be further mixed with 25 μg an EAT-2-expressing plasmid before formulation.

[1486] Vaccine safety and immunogenicity of the designed vaccine will be evaluated in a 42 day, optionally 56-day, animal trial. After a three-day acclimatization phase, pigs will receive a combination of an intranasal/intramuscular (IN/IM) prime (day 0) and boost vaccination (day 14) with the selected pools of plasmid constructs (e.g., ASFV putative antigen only, gD seq 1+ASFV putative CRA, or EAT-2+ gD:ASFV putative CRA fusion protein). At study termination, pigs will be sacrificed and tracheobronchial lymph nodes collected for assessing the lung-regional immune response. Safety will be assessed by clinical monitoring; immunogenicity will be evaluated by weekly blood collections for isolation and storage of serum and PBMC. Sera will be used for neutralizing antibody analyses. PBMC will be used for in vitro restimulation assays to determine the vaccine-induced NK- and T-cell IR(s).

[1487] The following groups can be included in the study: Group A will receive a MOCK vaccination (unformulated CaPNP only (4 pigs)); group B will receive EAT-2-expressing plasmid only (4 pigs); group C will be administered gDAgFPES plasmids including AgES(s) from the synthetic gene library (8 pigs, 25 μg per plasmid); and group D will receive both, the synthetic library gDFP-expressing plasmid & EAT-2-expressing plasmid (8 pigs, 25 μg per plasmid).

[1488] To determine the T-cell response to the plasmid pool-encoded antigens, PBMC and lymphocytes isolated from tracheobronchial lymph nodes will be in vitro restimulated with a peptide pool representing the antigens used for vaccination. Activation/proliferation, cytotoxicity, cytokine production, differentiation, and homing pattern of T-cell subsets will be analyzed via multi-color flow cytometry. Activation/proliferation will be assessed by staining the cells with a proliferation dye (CellTrace™ Violet Cell Proliferation Kit, ThermoFisher, Waltham, Mass.) prior to a four-day cultivation period. Cytokine production will be determined using cytokine-specific antibodies (IFN-γ, TNF-α, and/or IL-2) after a 24-hour stimulation including a Golgi-inhibitor for the last four hours of culture to ensure cytokine accumulation within the cells. NK-cell and CTL cytotoxicity will be assessed by a CD10⁷ degranulation assay following the procedures described by Mair et al. 2013. Proliferation, cytotoxicity, and cytokine stainings will be combined with antibody stainings against markers to distinguish different T-cell subsets (CD3, CD4, CD8α, TCR-γδ) as well as their differentiation status (CD45) and homing pattern (CCR7).

[1489] Only healthy piglets will be enrolled. Piglets will be randomly assigned to groups using the GraphPad online randomizer tool (https://www.graphpad.com/quickcalcs/randomizel/). Studies are planned with appropriate controls; and results will be analyzed via valid and appropriate statistical methodologies. The animal trial will be performed under BSL-2 conditions with approved Biological Use Authorizations and IACUC approval. The parameters to be measured to reflect effect of the treatments encompass different aspects of safety and immunogenicity. All in vitro studies will be performed in a BSL-2 certified laboratory. Scientific and experimental rigor are maintained in the laboratory. In vitro protocols are well established.

[1490] Data will be analyzed for normal distribution by Kolmogorov-Smirnov analysis. Non-normally distributed data will be analyzed by Mann-Whitney test. Normally distributed data will be analyzed using a repeated-measures 2-way ANOVA with time and vaccination as the 2 factors. Necropsy data will be analyzed by 2-way ANOVA with in vitro re-stimulation and vaccination as the 2 factors. Post hoc multiple comparisons will use the Dunnett's test. Differences will be defined significant (*) for P<0.05.

[1491] It is anticipated that the designed vaccine, especially in the context of EAT-2 co-expression, will induce a profound NK and T-cell response, especially in CTLs. This response will be a combination of proliferation, cytotoxicity, cytokine production and the development of tissue-homing memory cells (T effector memory cells, TEM).

[1492] PBMC isolated during the proposed study can further be used for a phase 2 leg of this project. Phase 2 will determine: i) the individual antigens or epitopes (e.g., a particular protein or epitope) within larger antigen units (e.g., an ORF or a large fragment of an ORF) that generated the detected immune responses; ii) confirmation of the immunogenicity of these antigens by in vitro re-stimulation with ASFV-infected cells; iii) the effects of gD and EAT-2 targeting/enhancement components of the system; iv) generated serum neutralizing antibody levels; and v) a challenge study using a combination of individual antigens that elicited a CTL and/or NK cells response.

### V. Example 4—ASFV Plasmid Expression Vector

[1493] This Example demonstrates configurations of DNA plasmid vectors encoding ASFV antigens that can be used in trials such as those described in Example 3, and, if proven efficacious, for vaccination or treatment applications.

[1494] Plasmids are constructed to contain unique BamHI and NheI restriction enzyme sites before a human polyubiquitin sequence (e.g., SEQ ID NO: 1) and a NotI site after the ubiquitin-encoding sequence. An ASFV CP204L-encoding sequence (encoding an ASFV p30 protein) is inserted after the NotI site followed by 2A peptide cleavage sequence. A GFP reporter gene-encoding sequence is also incorporated, followed by unique restriction enzyme sites XhoI, PmeI, EcoRI, and ApaI.

[1495] The incorporation of multiple internal restriction sites and 3′ sites provides the plasmid vector with the ability to incorporate genes in a variety of locations. For example, by use of select sites, cloning without fusion can be performed (clone at BamHI/NheI to XhoI/PmeI/EcoRI/ApaI).; cloning to result in an N-terminal Ubiquitin fusion and no GFP (clone at NotI to XhoI/PmeI/EcoRI/ApaI) can be performed; cloning to obtain a C-terminal cleavable GFP fusion (clone at BamHI/NheI to AgeI) can be performed; cloning to achieve an N-terminal Ubiquitin and C-terminal GFP fusion (clone at NotI to AgeI) can be performed; and/or cloning to replace GFP with any other marker (clone at AgeI to XhoI/PmeI/EcoRI/ApaI) can be performed.

[1496] The plasmid can be tested in experiments such as those described in Example 3 or other experiments in cell lines and pigs by detecting CP204L and GFP protein expression, B-cell response, T-cell response by western blotting, ELISpot, or flow cytometry, with suitable negative controls. In one variation, the CVM IE promoter is replaced with or also contains a CAG promoter. Plasmid expression in swine can be subjected to testing prior to larger scale trials by performing small-scale (e.g., 1-3 pig trials), each pig inoculated with endotoxin-free prepped plasmids as described above under different test conditions (e.g., with CMV or CAG promoters). Examples of a sequence overview of key elements of such plasmid constructs include (1) pMBF116-CMVp-Ub-CP204L-T2A-GFP-TcnR sequence (6153 bp (SEQ ID NO: 2)) (the DNA subsequence encoding ASFV CP204L antigen, GenBank Access No. YP_009704045.1 (encoding SEQ ID NO: 23), starting at nt 1905, is the first subsequence in ALL CAPS; the 2^{nd} ALL CAPS subsequence is a GFP sequence and the 3^{rd} long ALL CAPS sequence is a plasmid backbone sequence)—

(SEQ ID NO: 3)
cctgcaggtcgacaatattggctattggccattgcatacgttgtatctatatcataatatgtacatttata
ttggctcatgtccaatatgaccgccatgttgacattgattattgactagttattaatagtaatcaattacg
gggtcattagttcatagcccatatatggagttccgcgttacataacttacggtaaatggcccgcctggctg
accgcccaacgacccccgcccattgacgtcaataatgacgtatgttcccatagtaacgccaatagggactt
tccattgacgtcaatgggtggagtatttacggtaaactgcccacttggcagtacatcaagtgtatcatatg
ccaagtccgccccctattgacgtcaatgacggtaaatggcccgcctggcattatgcccagtacatgacctt
acgggactttcctacttggcagtacatctacgtattagtcatcgctattaccatggtgatgcggttttggc
agtacaccaatgggcgtggatagcggtttgactcacggggatttccaagtctccaccccattgacgtcaat
gggagtttgttttggcaccaaaatcaacgggactttccaaaatgtcgtaataaccccgccccgttgacgca
aatgggcggtaggcgtgtacggtgggaggtctatataagcagagctcgtttagtgaaccgtcagatcgcct
ggagacgccatccacgctgttttgacctccatagaagacaccgggaccgatccagcctccgcggccgggaa
cggtgcattggaacgcggattccccgtgccaagagtgacgtaagtaccgcctatagactctataggcacac
ccctttggctcttatgcatgctatactgtttttggcttggggcctatacacccccgcttccttatgctata
ggtgatggtatagcttagcctataggtgtgggttattgaccattattgaccactcccctattggtgacgat
actttccattactaatccataacatggctctttgccacaactatctctattggctatatgccaatactctg
tccttcagagactgacacggactctgtatttttacaggatggggtcccatttattatttacaaattcacat
atacaacaacgccgtcccccgtgcccgcagtttttattaaacatagcgtgggatctccacgcgaatctcgg
gtacgtgttccggacatgggctcttctccggtagcggcggagcttccacatccgagccctggtcccatgcc
tccagcggctcatggtcgctcggcagctccttgctcctaacagtggaggccagacttaggcacagcacaat
gcccaccaccaccagtgtgccgcacaaggccgtggcggtagggtatgtgtctgaaaatgagctcggagatt
gggctcgcaccgctgacgcagatggaagacttaaggcagcggcagaagaagatgcaggcagctgagttgtt
gtattctgataagagtcagaggtaactcccgttgcggtgctgttaacggtggagggcagtgtagtctgagc
agtactcgttgctgccgcgcgcgccaccagacataatagctgacagactaacagactgttcctttccatgg
gtcttttctgcagtcaccgtccaagcttggatccGCTAGCgccaccATGcagatcttcgtgaagaccctga
ccggcaagaccatcaccctggaggtggagcccagtgacaccatcgagaatgtgaaggccaagatccaggat
aaggagggcattccccccgaccagcagaggctcatctttgcaggcaagcagctggaggatggccgcactct
ttctgattacaacatccagaaagagtccaccctccatctggttctgcgtctgaggggtGCGGCCGCAGATT
TTATTTTAAATATATCCATGAAAATGGAGGTCATCTTCAAAACGGATTTAAGATCATCTTCACAAGTTGTG
TTTCATGCGGGTAGCCTGTATAATTGGTTTTCTGTTGAGATTATCAATAGCGGTAGAATTGTTACGACCGC
TATAAAAACATTGCTTAGTACTGTTAAGTATGATATTGTGAAATCTGCTCGTATATATGCAGGGCAAGGGT
ATACTGAACATCAGGCTCAAGAAGAATGGAATATGATTCTGCATGTGCTGTTTGAAGAGGAGACGGAATCC
TCAGCATCTTCGGAGAACATTCATGAAAAAAATGATAATGAAACCAATGAATGCACATCCTCCTTTGAAAC
GTTGTTTGAGCAAGAGCCCTCATCGGAGGTACCTAAAGACTCCAAGCTGTATATGCTTGCACAAAAGACTG
TGCAACATATTGAACAATATGGAAAGGCACCTGATTTTAACAAGGTTATTAGAGCACATAATTTTATTCAA
ACCATTTATGGAACCCCTCTAAAGGAAGAAGAAAAAGAGGTGGTAAGACTCATGGTTATTAAACTTTTAAA
AAAAATAAGCTATCTCACCTACATTaccggttccggcgagggcaggggaagtcttctaacatgcggggacg
tggaggaaaatcccggcccaGTGAGCAAGGGCGAGGAGCTGTTCACCGGGGTGGTGCCCATCCTGGTCGAG
CTGGACGGCGACGTAAACGGCCACAAGTTCAGCGTGTCCGGCGAGGGCGAGGGCGATGCCACCTACGGCAA
GCTGACCCTGAAGTTCATCTGCACCACCGGCAAGCTGCCCGTGCCCTGGCCCACCCTCGTGACCACCCTGA
CCTACGGCGTGCAGTGCTTCAGCCGCTACCCCGACCACATGAAGCAGCACGACTTCTTCAAGTCCGCCATG
CCCGAAGGCTACGTCCAGGAGCGCACCATCTTCTTCAAGGACGACGGCAACTACAAGACCCGCGCCGAGGT
GAAGTTCGAGGGCGACACCCTGGTGAACCGCATCGAGCTGAAGGGCATCGACTTCAAGGAGGACGGCAACA
TCCTGGGGCACAAGCTGGAGTACAACTACAACAGCCACAACGTCTATATCATGGCCGACAAGCAGAAGAAC
GGCATCAAGGTGAACTTCAAGATCCGCCACAACATCGAGGACGGCAGCGTGCAGCTCGCCGACCACTACCA
GCAGAACACCCCCATCGGCGACGGCCCCGTGCTGCTGCCCGACAACCACTACCTGAGCACCCAGTCCGCCC
TGAGCAAAGACCCCAACGAGAAGCGCGATCACATGGTCCTGCTGGAGTTCGTGACCGCCGCCGGGATCACT
CTCGGCATGGACGAGCTGTACAAGTAActcgagGTTTAAACgaattctgcagatatccagcacagtggtcg
aggggcccggagatctacgtatgatcagcctcgactgtgccttctagttgccagccatctgttgtttgccc
ctcccccgtgccttccttgaccctggaaggtgccactcccactgtcctttcctaataaaatgaggaaattg
catcgcattgtctgagtaggtgtcattctattctggggggtggggtggggcaggacagcaagggggaggat
tgggaagacaatagcaggcatgctggggatgcggtgggctctatggcttctgaggcggaaagaaccagctg
gggctcgacagctcgactctagaattgcttcctcgctcactgactcgctgcgctcggtcgttcggctgcgg
cgagcggtatcagctcactcaaaggcggtaatacggttatccacagaatcaggggataacgcaggaaagaa
catgtgagcaaaaggccagcaaaaggccaggaaccgtaaaaaggccgcgttgctggcgtttttccataggc
tccgcccccctgacgagcatcacaaaaatcgacgctcaagtcagaggtggcgaaacccgacaggactataa
agataccaggcgtttccccctggaagctccctcgtgcgctctcctgttccgaccctgccgcttaccggata
cctgtccgcctttctcccttcgggaagcgtggcgctttctcatagctcacgctgtaggtatctcagttcgg
tgtaggtcgttcgctccaagctgggctgtgtgcacgaaccccccgttcagcccgaccgctgcgccttatcc
ggtaactatcgtcttgagtccaacccggtaagacacgacttatcgccactggcagcagccactggtaacag
gattagcagagcgaggtatgtaggcggtgctacagagttcttgaagtggtggcctaactacggctacacta
gaagaacagtatttggtatctgcgctctgctgaagccagttaccttcggaaaaagagttggtagctcttga
tccggcaaacaaaccaccgctggtagcggtggtttttttgtttgcaagcagcagattacgcgcagaaaaaa
aggatctcaagaagatcctttgatcttttctacggggtctgacgctcagtggaacgaaaactcacgttaag
ggattttggtcatgagattatcaaaaaggatcttcacctagatccttttaaattaaaaatgaagttttaaa
tcaatctaaagtatatatgagtaaacttggtctgacagttaccaatgcttaatcagtgaggcacctatctc
agcgatctgtctatttcgttcatccatagttgcctgactcggggggggggggcgctgaggtctgcctcgtg
aagaaggtgttgctgactcataccaggcctgaatcgccccatcatccagccagaaagtgagggagccacgg
ttgatgagagctttgttgtaggtggaccagttggtgattttgaacttttgctttgccacggaacggtctgc
gttgtcgggaagatgcgtgatctgatccttcaactcagcaaaagttcgatttattcaacaaagccgccgtc
ccgtcaagtcagcgtaatgctctgccagtgttacaaccaattaaccaattctgaTTAATTAAttatttcag
ttcgagttcgttcattgcagcaatgctgaaaccgccgtcaacgtggaccacttcaccggagataccggcag
agagatcggagcacaggaatgccgcagagttacccacatcttcaatagtaacggtacggcgaatcggggta
acggcttcgcaatgagccagcattttgcggaagtctttgataccggaggccgccagagtacggatcggacc
agcagagatggcgttaacacgcacaccttccggacccatcgcgttcgccatatagcgcacgttcgcttcca
gagacgcttttgccagacccataacgttgtagttcgggatagcgcgctcagcgccaaggtaggaaagggtc
agcagggcagaacccggattcagcatggagcggcaagcttttgccattgcaacgaagctgtaggagctgat
gtcgtgggcaattttgaagccttcacgggtaacggcgttaacatagtcaccatccagctgatcgccaggtg
caaaaccaatagagtgtacgaaaccgtcaaatttcggccaaactttccccagttcagcgaacatggtgtcg
atgctggcatcttctgcaacatcgcactgcagaacgatgtcagaacccaattgagcggcaaattcttctac
gcggcctttcagtttgtcgttctggtaggtgaatgccagttcagctccttcgcggtgcatcgcctgagcga
taccgtaggcgatggatagtttgctggcaacGccggttaccagaatgcgcttaccggaaagaaaacccatA
GCTTTAATCCTTATTGTTGATGCTTGTTGTGCCTGAAAATCAGGCGATTCGTCGAGTAAACAGTACGAACA
GATAAACGGTTATTATAATCAACCTGGCTGTGAGTAGCTATAGTTGCCAGGTCCGACCGGAGCAGGCTGCG
GCAGGGGGGGCGCTTTTCCCCTCACCCTAACCCTCTCCCCAGAGGGGCGAGGGGACCGTATTGTGCAAATA
TTGTTACCCCAGCAACAAACAGGCTCATACAGCCCCTAACCCTTTCATGGCGATGGCTGGGACGGTTCAGA
CCTTGCCGAATATTCTCCAGCACaatattattgaagcatttatcagggttattgtcGGCGCGCCtcagaga
ttttgagacacaacgtggctttccccccccccccggcatg
and
(2) pMBF117-CMVp-Ub-CP204L-T2A-GFP-TcnR sequence: 6223 bp

(the 1st subsequence marked in ALL CAPS is a plasmid backbone sequence; a subsequence encoding ASFV CP204L antigen, GenBank Accession No. YP_009704045.1 (encoding SEQ ID NO: 23), starts at nt 1905 as the second subsequence marked in ALL CAPS; and the third long sequence marked in ALL CAPS is a GFP sequence; finally, the fourth long DNA subsequence noted in ALL CAPS is a different plasmid backbone sequence)—

cctgcaggtcgacATTGATTATTGACTAGTTATTAATAGTAATCAATTACGGGGTCATTAGTTCATAGCCC
ATATATGGAGTTCCGCGTTACATAACTTACGGTAAATGGCCCGCCTGGCTGACCGCCCAACGACCCCCGCC
CATTGACGTCAATAATGACGTATGTTCCCATAGTAACGCCAATAGGGACTTTCCATTGACGTCAATGGGTG
GACTATTTACGGTAAACTGCCCACTTGGCAGTACATCAAGTGTATCATATGCCAAGTACGCCCCCTATTGA
CGTCAATGACGGTAAATGGCCCGCCTGGCATTATGCCCAGTACATGACCTTATGGGACTTTCCTACTTGGC
AGTACATCTACGTATTAGTCATCGCTATTACCATGGGTCGAGGTGAGCCCCACGTTCTGCTTCACTCTCCC
CATCTCCCCCCCCTCCCCACCCCCAATTTTTGTATTTATTTATTTTTTAATTATTTTGTGCAGCGATGGGG
GCGGGGGGGGGGGGGGCGCGCGCCAGGCGGGGCGGGGCGGGGCGAGGGGCGGGGCGGGGCGAGGCGGAGAG
GTGCGGCGGCAGCCAATCAGAGCGGCGCGCTCCGAAAGTTTCCTTTTATGGCGAGGCGGCGGCGGCGGCGG
CCCTATAAAAAGCGAAGCGCGCGGCGGGCGGGAGTCGCTGCGTTGCCTTCGCCCCGTGCCCCGCTCCGCGC
CGCCTCGCGCCGCCCGCCCCGGCTCTGACTGACCGCGTTACTCCCACAGGTGAGCGGGCGGGACGGCCCTT
CTCCTCCGGGCTGTAATTAGCGCTTGGTTTAATGACGGCTCGTTTCTTTTCTGTGGCTGCGTGAAAGCCTT
AAAGGGCTCCGGGAGGGCCCTTTGTGCGGGGGGGAGCGGCTCGGGGGGTGCGTGCGTGTGTGTGTGCGTGG
GGAGCGCCGCGTGCGGCCCGCGCTGCCCGGCGGCTGTGAGCGCTGCGGGCGCGGCGCGGGGCTTTGTGCGC
TCCGCGTGTGCGCGAGGGGAGCGCGGCCGGGGGCGGTGCCCCGCGGTGCGGGGGGGCTGCGAGGGGAACAA
AGGCTGCGTGCGGGGTGTGTGCGTGGGGGGGTGAGCAGGGGGTGTGGGCGCGGCGGTCGGGCTGTAACCCC
CCCCTGCACCCCCCTCCCCGAGTTGCTGAGCACGGCCCGGCTTCGGGTGCGGGGCTCCGTGCGGGGCGTGG
CGCGGGGCTCGCCGTGCCGGGCGGGGGGTGGCGGCAGGTGGGGGTGCCGGGCGGGGCGGGGCCGCCTCGGG
CCGGGGAGGGCTCGGGGGAGGGGCGCGGCGGCCCCGGAGCGCCGGCGGCTGTCGAGGCGCGGCGAGCCGCA
GCCATTGCCTTTTATGGTAATCGTGCGAGAGGGCGCAGGGACTTCCTTTGTCCCAAATCTGGCGGAGCCGA
AATCTGGGAGGCGCCGCCGCACCCCCTCTAGCGGGCGCGGGCGAAGCGGTGCGGCGCCGGCAGGAAGGAAA
TGGGCGGGGAGGGCCTTCGTGCGTCGCCGCGCCGCCGTCCCCTTCTCCATCTCCAGCCTCGGGGCTGCCGC
AGGGGGACGGCTGCCTTCGGGGGGGACGGGGCAGGGCGGGGTTCGGCTTCTGGCGTGTGACCGGCGGCTCT
AGAGCCTCTGCTAACCATGTTCATGCCTTCTTCTTTTTCCTACAGCTCCTGGGCAACGTGCTGGTTATTGT
GCTGTCTCATCTTTTGGCAAAaagcttggatccGCTAGCgccaccATGcagatcttcgtgaagaccctgac
cggcaagaccatcaccctggaggtggagcccagtgacaccatcgagaatgtgaaggccaagatccaggata
aggagggcattccccccgaccagcagaggctcatctttgcaggcaagcagctggaggatggccgcactctt
tctgattacaacatccagaaagagtccaccctccatctggttctgcgtctgaggggtGCGGCCGCAGATTT
TATTTTAAATATATCCATGAAAATGGAGGTCATCTTCAAAACGGATTTAAGATCATCTTCACAAGTTGTGT
TTCATGCGGGTAGCCTGTATAATTGGTTTTCTGTTGAGATTATCAATAGCGGTAGAATTGTTACGACCGCT
ATAAAAACATTGCTTAGTACTGTTAAGTATGATATTGTGAAATCTGCTCGTATATATGCAGGGCAAGGGTA
TACTGAACATCAGGCTCAAGAAGAATGGAATATGATTCTGCATGTGCTGTTTGAAGAGGAGACGGAATCCT
CAGCATCTTCGGAGAACATTCATGAAAAAAATGATAATGAAACCAATGAATGCACATCCTCCTTTGAAACG
TTGTTTGAGCAAGAGCCCTCATCGGAGGTACCTAAAGACTCCAAGCTGTATATGCTTGCACAAAAGACTGT
GCAACATATTGAACAATATGGAAAGGCACCTGATTTTAACAAGGTTATTAGAGCACATAATTTTATTCAAA
CCATTTATGGAACCCCTCTAAAGGAAGAAGAAAAAGAGGTGGTAAGACTCATGGTTATTAAACTTTTAAAA
AAAATAAGCTTTTATCTCACCTACATTaccggttccggcgagggcaggggaagtcttctaacatgcgggga
cgtggaggaaaatcccggcccaGTGAGCAAGGGCGAGGAGCTGTTCACCGGGGTGGTGCCCATCCTGGTCG
AGCTGGACGGCGACGTAAACGGCCACAAGTTCAGCGTGTCCGGCGAGGGCGAGGGCGATGCCACCTACGGC
AAGCTGACCCTGAAGTTCATCTGCACCACCGGCAAGCTGCCCGTGCCCTGGCCCACCCTCGTGACCACCCT
GACCTACGGCGTGCAGTGCTTCAGCCGCTACCCCGACCACATGAAGCAGCACGACTTCTTCAAGTCCGCCA
TGCCCGAAGGCTACGTCCAGGAGCGCACCATCTTCTTCAAGGACGACGGCAACTACAAGACCCGCGCCGAG
GTGAAGTTCGAGGGCGACACCCTGGTGAACCGCATCGAGCTGAAGGGCATCGACTTCAAGGAGGACGGCAA
CATCCTGGGGCACAAGCTGGAGTACAACTACAACAGCCACAACGTCTATATCATGGCCGACAAGCAGAAGA
ACGGCATCAAGGTGAACTTCAAGATCCGCCACAACATCGAGGACGGCAGCGTGCAGCTCGCCGACCACTAC
CAGCAGAACACCCCCATCGGCGACGGCCCCGTGCTGCTGCCCGACAACCACTACCTGAGCACCCAGTCCGC
CCTGAGCAAAGACCCCAACGAGAAGCGCGATCACATGGTCCTGCTGGAGTTCGTGACCGCCGCCGGGATCA
CTCTCGGCATGGACGAGCTGTACAAGTAActcgagGTTTAAACgaattctgcagatatccagcacagtggt
cgaggggcccggagatctacgtatgatcagcctcgactgtgccttctagttgccagccatctgttgtttgc
ccctcccccgtgccttccttgaccctggaaggtgccactcccactgtcctttcctaataaaatgaggaaat
tgcatcgcattgtctgagtaggtgtcattctattctggggggtggggtggggcaggacagcaagggggagg
attgggaagacaatagcaggcatgctggggatgcggtgggctctatggcttctgaggcggaaagaaccagc
tggggctcgacagctcgactctagaattgcttcctcgctcactgactcgctgcgctcggtcgttcggctgc
ggcgagcggtatcagctcactcaaaggcggtaatacggttatccacagaatcaggggataacgcaggaaag
aacatgtgagcaaaaggccagcaaaaggccaggaaccgtaaaaaggccgcgttgctggcgtttttccatag
gctccgcccccctgacgagcatcacaaaaatcgacgctcaagtcagaggtggcgaaacccgacaggactat
aaagataccaggcgtttccccctggaagctccctcgtgcgctctcctgttccgaccctgccgcttaccgga
tacctgtccgcctttctcccttcgggaagcgtggcgctttctcatagctcacgctgtaggtatctcagttc
ggtgtaggtcgttcgctccaagctgggctgtgtgcacgaaccccccgttcagcccgaccgctgcgccttat
ccggtaactatcgtcttgagtccaacccggtaagacacgacttatcgccactggcagcagccactggtaac
aggattagcagagcgaggtatgtaggcggtgctacagagttcttgaagtggtggcctaactacggctacac
tagaagaacagtatttggtatctgcgctctgctgaagccagttaccttcggaaaaagagttggtagctctt
gatccggcaaacaaaccaccgctggtagcggtggtttttttgtttgcaagcagcagattacgcgcagaaaa
aaaggatctcaagaagatcctttgatcttttctacggggtctgacgctcagtggaacgaaaactcacgtta
agggattttggtcatgagattatcaaaaaggatcttcacctagatccttttaaattaaaaatgaagtttta
aatcaatctaaagtatatatgagtaaacttggtctgacagttaccaatgcttaatcagtgaggcacctatc
tcagcgatctgtctatttcgttcatccatagttgcctgactcggggggggggggcgctgaggtctgcctcg
tgaagaaggtgttgctgactcataccaggcctgaatcgccccatcatccagccagaaagtgagggagccac
ggttgatgagagctttgttgtaggtggaccagttggtgattttgaacttttgctttgccacggaacggtct
gcgttgtcgggaagatgcgtgatctgatccttcaactcagcaaaagttcgatttattcaacaaagccgccg
tcccgtcaagtcagcgtaatgctctgccagtgttacaaccaattaaccaattctgaTTAATTAAttatttc
agttcgagttcgttcattgcagcaatgctgaaaccgccgtcaacgtggaccacttcaccggagataccggc
agagagatcggagcacaggaatgccgcagagttacccacatcttcaatagtaacggtacggcgaatcgggg
taacggcttcgcaatgagccagcattttgcggaagtctttgataccggaggccgccagagtacggatcgga
ccagcagagatggcgttaacacgcacaccttccggacccatcgcgttcgccatatagcgcacgttcgcttc
cagagacgcttttgccagacccataacgttgtagttcgggatagcgcgctcagcgccaaggtaggaaaggg
tcagcagggcagaacccggattcagcatggagcggcaagcttttgccattgcaacgaagctgtaggagctg
atgtcgtgggcaattttgaagccttcacgggtaacggcgttaacatagtcaccatccagctgatcgccagg
tgcaaaaccaatagagtgtacgaaaccgtcaaatttcggccaaactttccccagttcagcgaacatggtgt
cgatgctggcatcttctgcaacatcgcactgcagaacgatgtcagaacccaattgagcggcaaattcttct
acgcggcctttcagtttgtcgttctggtaggtgaatgccagttcagctccttcgcggtgcatcgcctgagc
gataccgtaggcgatggatagtttgctggcaacGccggttaccagaatgcgcttaccggaaagaaaaccca
tAGCTTTAATCCTTATTGTTGATGCTTGTTGTGCCTGAAAATCAGGCGATTCGTCGTTTTAGTAAACAGTA
CGAACAGATAAACGGTTATTATAATCAACCTGGCTGTGAGTAGCTATAGTTGCCAGGTCCGACCGGAGCAG
GCTGCGGCAGGGGGGGCGCTTTTCCCCTCACCCTAACCCTCTCCCCAGAGGGGCGAGGGGACCGTATTGTG
CAAATATTGTTACCCCAGCAACAAACAGGCTCATACAGCCCCTAACCCTTTCATGGCGATGGCTGGGACGG
TTCAGACCTTGCCGAATATTCTCCAGCACaatattattgaagcatttatcagggttattgtcGGCGCGCCt
cagagattttgagacacaacgtggctttccccccccccccggcatg

[1497] It is expected that such plasmid vectors will result in a robust immune response in pigs and will be useful as or in generating constructs that are protective against ASFV when utilized in association with the principles described in the present disclosure.

### VI. Example 5—Canine Bladder Cancer

[1498] This Example demonstrates an approach to generating constructs for testing and demonstrating how constructs and compositions generated according to the principles and techniques provided in this disclosure can be used to demonstrate efficacy against canine bladder cancer in a clinical trial. The study comprises vaccine design, testing the vaccine for safety and immunogenicity in healthy dogs, and a clinical safety and efficacy study in dogs with naturally occurring bladder cancer. Diagnostic tests will be used to classify T cell tumor type in each patient to correlate efficacy of the vaccine combination therapy with T cell inflamed and the more difficult-to-treat T cell non inflamed tumors. A successful outcome of this study will be an immunotherapeutic checkpoint inhibitor vaccine whose efficacy can be correlated with tumor classification and response to treatment. Phase 2 will be the design and conduct of a pivotal safety and efficacy study in dogs.

[1499] Sequences encoding one or more, typically five (5) or more (e.g., eight or more, ten or more, or even twelve or more, such as 13 antigens as exemplified below) anti-tumor antigens known to be T cell targets in bladder cancer are obtained and fused with sequences encoding gD1 seq 1 and gD1 seq 2 to generate a gD:antigen fusion protein-encoding construct. The different antigen sequences can optionally be separated by linker sequences (e.g., any of the mid-sized linker sequences described in the Detailed Description or more simple linkers such as Ala-Ala linkers), cleavage sites, or both. Both DNA plasmid vectors and adenoviral vectors comprising the constructs can be generated for application such as gD:antigen fusion protein-encoding construct, such as a gD1 seq 1/gD1 seq 2 construct as described in Example 1, which is in turn incorporated into a suitable plasmid DNA vector delivery system and administered to dogs in a trial to assess the suitability of the CRAs in the context of a gD:antigen fusion protein expression system.

[1500] Alternatively, gD:antigen fusions can be cloned into adenovirus (“Ad”) C68 vector derived from a chimpanzee and deleted for the E1 gene that is essential for virus replication, has no known virulence features associated with this adenovirus, and is not normally found in dogs, such that dogs are expected to not exhibit pre-existing immunity to such vectors. It will be understood that Ad vectors having similar properties (little pre-existing immunity, replication deficiency, etc.) could be used as an alternative in this type of application. As adenoviral vectors can sometimes exhibit adjuvant effects and efficient expression of constructs they can be used as an alternative to or plasmid DNA vectors in combination with plasmid DNA vectors. Plasmids generated in the study will also include “shuttle plasmids” used to incorporate constructs within Ad vectors. Antigen expression from the vectors will be assessed in human kidney HEK293 and dog thymus Cf2Th cells. Once expression is confirmed, recombinant Ad vectors can be purified using known techniques. As a further step, initial T cell immunogenicity of the AdC68 gDmulti-antigen-expressing vector can be confirmed in mouse studies as described in the Wistar Art. In some cases, EAT-2 sequence is added to the construct to enhance immunological response or a separate vector comprising an EAT-2-expressing sequence is co-administered. In some cases, a separate vector comprising a sequence encoding only FAP is also or alternatively administered. In some cases, a separate vector comprising a sequence encoding a CRACC protein, such as a CRACC-Fc protein (CRACC protein fused to the Fc domain of IgG) is also or alternatively administered. CRACC is an IAII that upregulates innate immunity-NK cell and DC that in turn strengthens the adaptive immune response to vaccine antigens (T and B cell) and that also exhibits checkpoint inhibition effects. Sequences for a PTPS, such as SEQ ID NO: 1 and EEI(s), such as a CMV Intron A sequence, also can be incorporated if desired, either in initial constructs or in subsequently tested constructs.

[1501] Five dogs for each treatment group will be provided. Plasmids will be administered subcutaneously at a dosage of 10 to 100 micrograms. In some cases, plasmids expressing a FAP antigen will be separately co-administered with the gD:antigen-expressing construct, typically at the same dosage and by the same route. In other cases, a plasmid comprising a sequence encoding a CRACC IAII sequence also or alternatively will be administered to a similar group of dogs. Thus, for example, groups can be administered the gD:polyTAA-expressing plasmid vector alone; the gD:polyTAA vector+a FAP only-expressing plasmid, or a combination of all of the gD:polyTAA vector, the FAP only-expressing vector, and a CRACC-expressing vector. Other exemplary groups will include a combination of gD:polyTAA Ad68+CRACC-Fc Ad68 (exhibiting a dual checkpoint inhibitor therapy—also referred to as a “doublet therapy”); gD:polyTAA Ad68+CRACC-Fc Ad68+FAP Ad68; or gD:polyTAA Ad68+FAP Ad68+ EAT-2 Ad68. In cases, priming, boosting, or both with CaPNP-associated plasmids comprising corresponding constructs is performed.

[1502] PBMCs will be collected at appropriate timepoints post vaccination. Intracellular cytokine staining of PBMCs by ELISpot assays and flow cytometry analysis for production of interferon-gamma in response to the tumor-specific antigens present in the vaccine constructs will be performed. When possible, biopsy samples will be categorized by tumor type by genome expression profiling with the objective of correlating outcome to T cell inflamed or T cell noninflamed TME. T-cell-inflamed and non-T-cell-inflamed bladder tumors can be distinguished by immune gene expression profiling. SFE Sweis R F, Spranger S, Bao R, et al. Molecular Drivers of the Non-T-cell-Inflamed Tumor Microenvironment in Urothelial Bladder Cancer. Cancer Immunol Res. 2016; 4(7):563-568. doi:10.1158/2326-6066.CIR-15-0274, for relevant principles/methods and further methods provided in the Detailed Description.

[1503] From the results of these experiments, one or more constructs will be selected and advanced to scale up for pivotal studies in dogs.

### VII. Example 6—Human Bladder Cancer

[1504] Coordinated transcriptional changes in canine and human bladder cancer, including gene functions, pathways, and cytogenetic regions were highly similar at functional and pathway levels (see, Ramsay 2017). A comparison study of canine vs human TCC gene expression patterns revealed >43,000 genes expressed by both species, 436 were unique to TCC and common to both species (Dhawan et al. 2015).

[1505] Upon successful completion of a pivotal study of one or more of the constructs described in Example 5, human clinical safety and then efficacy studies will be performed using the Ad68 or plasmid DNA constructs comprising the vaccine successfully demonstrated in the canine model. It is expected that similar efficacy will be demonstrated in humans given relevance of the canine model of bladder cancer to the human condition.

### VIII. Example 7—Canine Influenza CRA Screening

[1506] This Example exemplifies use of the compositions and methods of the invention provided in this disclosure to provide an effective, innovative cross-protective vaccine for canine influenza (CIV). The objective of this effort is to develop a vaccine that is able to induce significant B cell and T cell responses to both H3N2 and H3N8 CIV. It is expected that effective treatment methods using constructs developed according to the methods in this Example (and generally in this disclosure) will result in a vaccine that elicits an effective immune response within seven to fourteen days of an initial (and possibly single/only) administration in terms of a significant reduction in viral shedding, reduction in viremia, and/or reduction in severity of CIV-related symptoms (e.g., cough, runny nose, fever, lethargy, eye discharge, and reduced appetite).

[1507] Expression Library Immunization studies will be conducted in vitro with infected cells and in healthy dogs. B and T cell responses to vaccine antigens in each of the pooled study groups will be evaluated and confirmed using ELISA, Flow Cytometry, and/or ELISpot. The results of this work will lead to the identification of clinically relevant antigens (CRAs) relevant to CIV. Nucleotide sequences encoding CRAs or variants of such CRAs (e.g., deglycosylation variants) will be generated and inserted into gD:antigen fusion protein constructs (e.g., gD1 seq 1 and gD1 seq 2 constructs, in which CIV CRA-encoding sequences will be inserted).

[1508] Also or alternatively a number of known CIV antigens can be used to generate putative gD:antigen fusion protein-encoding nucleic acid constructs. Candidate CIV antigens for use in such testing methods include: (a) Hemagglutinin A surface antigen or portions thereof (e.g., the conserved stalk—H3N2 HA stalk domain); (b) Ion channel protein M2 or portions thereof (e.g., domain M2 or domain M2e); (c) Nucleoprotein (NP); (d) M1 (matrix protein 1); (d) Neuraminidase (N1, N2); or (e) combinations of any/all thereof.

[1509] Also or alternatively, putative antigens expected to be associated with “unnatural immunity” (Scorza 2016; Nabel et al. 2010) (i.e., to induce antibody and cellular immunity to viral antigens that are not naturally or effectively recognized by the immune system but that can provide protection when presented to the immune system in a vaccine) are selected and related sequences incorporated into selected, suitable delivery systems.

[1510] Adenoviral vectors and/or DNA plasmids (associated with CaPNPs) will be generated comprising these sequences, EAT-2, and these gD:antigen fusion protein-encoding sequences plus EAT-2. These plasmids (and suitable control plasmids) will be first used in suitable safety/immunogenicity studies then in an immunization/challenge study in healthy dogs. An exemplary set of challenge study plasmid constructs could include: (a) Control; (b) hEAT-2; (c) hEAT-2+ gD1 seq 1:CRA:gD1 seq 2; and (d) gD1 seq 1:CRA:gD1 seq 2.

[1511] A variety of CRAs are expected to be identified by ELI, such that the number of CRA-encoding constructs is likely to be ≥1 in instances.

[1512] AOA, known Ag(s) expected to be effective in the context of the expression constructs of the invention can be directly generated and similarly tested. Candidate CIV antigens that can be include in such test constructs can include: The CIV HA stalk domain (HA-SD); CIV NP; CIV M1; and CIV M2.

[1513] For example, adenoviral vectors and/or DNA plasmids expressing HA Stalk Domain (HA-SD) fused to one or more of NP, M1, and M2 proteins can be tested in the following combinations and analyzed for B and T cell responses: (1) AdC68-HA-SD/NP/M1/M2; (2) AdC68-gD-HA-SD/NP/M1/M2; (3) CaPNP-gD-HA-SD/NP/M1/M2; (4) gD-HA-SD/NP/M1/M2; and Nobivac® Canine Flu Bivalent Vaccine (as a control/comparator).

[1514] All plasmids will be confirmed by DNA sequencing before transfecting into HEK293 and Cf2Th cells. Expression of individual proteins will be confirmed by western blotting using commercially available antigen-specific monoclonal or polyclonal antibodies.

[1515] Adenovirus shuttle plasmid and DNA vaccine plasmids with multi-gene co-expression using 2A cleavage sequences can be generated and analysis of constructs for antigen expression performed using methods discussed above. Plasmids can be used for viral vector delivery and plasmids are suitable for DNA vaccination with nanoparticles at the same time because the cloning strategy is similar. In vitro studies and vaccination with plasmid DNA delivered in nanoparticles and in a replication-defective adenoviral vector can be formed to conduct direct comparison of immune responses to the two different delivery systems. Adenoviral vectored constructs with and without gD allow for evaluation of gD responses DNA sequencing before transfection of HEK293 and Cf2Th cells and detection of the transgene proteins by western blot analysis will confirm that all plasmids are suitable for virus vector preparation and incorporation into particles. gD fusion antigens will be separated by cleavable spacers so that some antigens will be released into the circulation for exposure to B cells. Antigen protein expression will be analyzed with Western blots. If antigens are not expressed or not properly cleaved, the positions of the NP, M1, and M2 genes in relation to each other will be reordered to optimize expression of all four proteins.

[1516] E1/E3 deleted simian adenovirus Adc68, HuAd5 or other adenoviral strain not endemic in dogs can be used for adenoviral vector delivery systems. The well-established procedure of homologous recombination to insert shuttle plasmids into the backbone adenoviral plasmid will be used. HEK293 cells expressing HAd5 E1 gene products will be used for generation of replication deficient Ad-CIV101 recombinant virus. The steps involved are: 1) transfect the shuttle plasmid into the 293A Cell Line to produce an adenoviral stock, 2) amplify the adenoviral stock on 10×T75 flasks, 3) purify the virus, 4) titer the virus, 5) use the amplified adenoviral stock to transduce HEK293 and Cf2Th cells and analyze by western bot of transient expression of antigens, and 6) use purified and expression-confirmed virus for mouse immunogenicity studies. DNA plasmids will be generated and formulated with CaPNP before testing (e.g., CaPNP-gD-HA-SD/M1/M2).

[1517] The safety and immunogenicity of each of the candidate vaccines and commercial standard(s) will be assessed by administration to healthy dogs (e.g., 5 dogs per group), receiving 10 to 100 micrograms of plasmid DNA via mucosal or subcutaneous administration of CaPNP-gD-HA-SD/NP/M1/M2 or naked DNA gD-HA-SD/NP/M1/M2, optionally in combination with an EAT-2 expressing sequence or nucleic acid. Nucleic acid compositions will be delivered by mucosal or subcutaneous administration and 1 mL Nobivac® Canine Flu Bivalent Vaccine (killed H3N2 & H3N8 virus plus alum adjuvant; a conventional vaccine reference used as a comparator) also will be administered per current product instructions.

[1518] Blood will be collected from treated animals before vaccination and at 24, 48 and 168 hours (7 days), 14 days, and 21 and 42 days. Assays performed after vaccination can include CBC, plasma chemistry: baseline and at 24, 48, and 168 hours (7 days). Health inspection by (a) veterinarian(s), including rectal temperature can be performed at baseline, 1, 3, 6, and 12 hours post-treatment; once daily thereafter; and clinical observations waived on days when a physical exam is conducted at Days 2 and 7.

[1519] PBMC sampling from each group of 5 dogs can be taken at baseline, and 7, 14, 21 and 42 days after vaccination. Blood volume taken will be 10-15 ml. Blood collection procedures for T cell assays are conducted as follows: For each bleed/each dog, use a 2 BD Vacutainer® CPT™ Mononuclear Cell Preparation Tube—Sodium Heparin (16×125 mm/8 mL) from BD Bioscience) to collect 10-15 ml blood and process according to manufacturers' instructions. Because there can be a circadian rhythm to some immune responses, blood samples are be collected at approximately the same hour each sampling day throughout the study.

[1520] B cell responses in dogs can be assessed through virus neutralization and ELISA. For example, antibodies to NP, M2, or H3 (polyclonal) can be purchased currently or it is possible to generate polyclonal antibodies, for example to HA stalk. Enzyme-linked immunosorbent assay (ELISA) can be performed for antibodies to CIV antigens using sera from vaccinated and naive mice/dogs on plates coated with purified CIV antigens.

[1521] Intracellular cytokine staining can be performed as briefly described here: PBMCs will be tested by ELISpot assays for production of interferon-gamma in response to the influenza antigen-specific peptides present in the vaccine. CIV antigen-specific CD8+ and CD4+ T cell analyses will be conducted on selected cryopreserved PBMCs. All samples from each dog will be analyzed in parallel. Cells will be stained with a live cell stain, antibodies to CD3, CD4 and CD8 and intracellular interferon-gamma and TNF-alpha. A goal of this experiment is to determine if frequencies of T cells to influenza-associated antigens increase after vaccination. It is expected that days 7-14 will show peak IRs, while week 6 responses are expected to represent steady state IRs.

[1522] The Phase I study will be followed by advancing one or more CIV antigen constructs to a Phase I challenge study in dogs. Through application of such methods, one or more candidates for pivotal trials and further development into approved treatments for CIV are expected to be developed.

### IX. Example 8—EHV Treatment

[1523] This Example outlines the application of principles, compositions, and methods of this invention to develop candidate vaccines leading to an effective vaccine that elicits effective, long-lasting protective immunity to equine herpes virus (EHV). It is specifically expected that identified effective vaccines developed by such methods will make significant improvements in terms of EHV-related myeloencephalopathy and abortion rates and both prevent infection and reactivation from latency.

[1524] The EHV-1 genome consists of 80 ORFs (Paillot R. et al. 2008) that separate into four categories (Allen et al 2004):

1. nucleocapsid and tegument structural proteins;
2. transmembrane/envelope glycoproteins;
3. regulatory/transcription activation proteins;
4. DNA replication, viral packaging, morphogenesis, and egress proteins.

[1525] Putative CRAs can be identified by Expression Library Immunization (ELI) as discussed above and/or mass spectrometry (MS) using known methods. Alternatively, known EHV candidate antigens to be directly tested in methods similar to those described in the preceding Examples can include: (a) IE (ICP4, ORF 64 intermediate early) protein; (b) ORF-12 tegument protein α-TIF; (c) ICP0; (d) gB; (e) gD; (f) gH; (g) gL; (h) gK; (i) gC; (j) gE; (k) gG; (1) gI; (m) gM; (n) sp300; (o) gE/gI; (p) gM; (q) gp300 (gp2); (r) UL27 (gB); (s) UL29 (major DNA binding protein); (t) UL39 (ribonucleoside reductase R1); (u) ICP4 (IE protein); (v) ICP0 (ubiquitin E3 ligase); (w) ICP22 (intermediate early infectious cell protein 22); (x) ICP27 (intermediate early infectious cell protein 27); (y) VP22 (tegument); (z) VP26 (small capsid protein); (aa) TK (thymidine kinase); and (bb) ICP10 (intermediate early infectious cell protein 10).

[1526] In one variant antigens will be selected to elicit “unnatural immunity” (Scorza 2016; Nabel et al. 2010), that is, to induce antibody and cellular immunity to viral antigens that are not naturally or effectively recognized by the immune system, but that are capable of providing effective, broad spectrum protection when presented to the immune system in a vaccine.

[1527] Confirmation of antigen expression from constructs will be performed in human kidney HEK293 and equine monocytes or dendritic cells. All plasmids will be confirmed by DNA sequencing before transfecting into HEK293 and equine cells. Expression of individual proteins will be confirmed by western blotting using antigen-specific monoclonal or polyclonal antibodies. PBMC from naturally EHV infected horses can be used to probe CTL recognition of cultured cells transfected with antigen-bearing constructs. Endotoxin-free plasmid megapreps will be prepared and plasmids formulated with at least one vaccine candidate for pilot testing. Naive horses will be vaccinated subcutaneously or mucosally with constructs to evaluate safety and CTL response to the vaccine candidates. This step will confirm safety and characterize the cellular immune response to vaccine antigens by ELISpot and flow cytometry. T cell responses to vaccine antigens in vitro using PBMC from naturally infected horses will also be analyzed. The results of these studies will be used to select candidates for phase 2 challenge studies and to develop effective medicines.

### X. Example 9—Coronavirus Constructs

[1528] This Example demonstrates the application of similar approaches to those described in the preceding Examples to Coronavirus SARS COV2.

[1529] Vaccine compositions comprising gD:antigen fusion protein constructs comprising SARS COV2 antigens are prepared comprising either a single plasmid (comprising both gD:antigen fusion protein-encoding sequences and an EAT-2 polypeptide coding sequence) or two plasmids (one plasmid containing gD:SARS COV2 antigen-encoding sequence and the other plasmid comprising an EAT-2-coding sequence). Constructs generated for the performance of these experiments will either include (1) constructs encoding only gD sequences that do not effectively bind HVEM or (2) constructs that separately contain both HVEM-binding and non-effective-HVEM-binding gD sequences. SARS COV2 antigens may only be contained in the C-terminus of the gD:antigen fusion protein, internally to two gD domains, or both. EAT-2 sequences will comprise human EAT-2 (hEAT-2) or a functional fragment thereof or murine EAT-2 (mEAT-2) or a function fragment thereof or both types of sequences will be included among different constructs.

[1530] SARS COV2 antigens contained in the fusion protein(s) expressed by constructs used in the study will include SARS COV2 surface glycoprotein (S), Nucleocapsid (N), Membrane glycoprotein (M) sequences, or combinations thereof. Variants can be generated and tested (either as the only test candidates or in comparison to other candidates) by substitutions introduced in one, several, or all of the N-X-S sequences or N-X-T sequences present in such antigen amino acid sequences. An example of a source of candidate sequences and virus that can be used in testing of vaccine candidate constructs is provided at NCBI Reference Sequence: NC_045512.2 (severe acute respiratory syndrome coronavirus 2 isolate Wuhan-Hu-1, complete genome).

[1531] An example of a SARS COV2 S sequence (SEQ ID NO: 14) is shown below (sites for possible modification for variant generation are bolded and underlined): >YP_009724390.1 surface glycoprotein

### [Severe Acute Respiratory Syndrome Coronavirus 2]

MFVFLVLLPLVSSQCVNLTTRTQLPPAYTNSFTRGVYYPDKVFRSSVLHST
QDLFLPFFSNVTWFHAIHVSGTNGTKRFDNPVLPFNDGVYFASTEKSNIIR
GWIFGTTLDSKTQSLLIVNNATNVVIKVCEFQFCNDPFLGVYYHKNNKSWM
ESEFRVYSSANNCTFEYVSQPFLMDLEGKQGNFKNLREFVFKNIDGYFKIY
SKHTPINLVRDLPQGFSALEPLVDLPIGINITRFQTLLALHRSYLTPGDSS
SGWTAGAAAYYVGYLQPRTFLLKYNENGTITDAVDCALDPLSETKCTLKSF
TVEKGIYQTSNFRVQPTESIVRFPNITNLCPFGEVFNATRFASVYAWNRKR
ISNCVADYSVLYNSASFSTFKCYGVSPTKLNDLCFTNVYADSFVIRGDEVR
QIAPGQTGKIADYNYKLPDDFTGCVIAWNSNNLDSKVGGNYNYLYRLFRKS
NLKPFERDISTEIYQAGSTPCNGVEGFNCYFPLQSYGFQPTNGVGYQPYRV
VVLSFELLHAPATVCGPKKSTNLVKNKCVNFNFNGLTGTGVLTESNKKFLP
FQQFGRDIADTTDAVRDPQTLEILDITPCSFGGVSVITPGTNTSNQVAVLY
QDVNCTEVPVAIHADQLTPTWRVYSTGSNVFQTRAGCLIGAEHVNNSYECD
IPIGAGICASYQTQTNSPRRARSVASQSIIAYTMSLGAENSVAYSNNSIAI
PTNFTISVTTEILPVSMTKTSVDCTMYICGDSTECSNLLLQYGSFCTQLNR
ALTGIAVEQDKNTQEVFAQVKQIYKTPPIKDFGGFNFSQILPDPSKPSKRS
FIEDLLFNKVTLADAGFIKQYGDCLGDIAARDLICAQKFNGLTVLPPLLTD
EMIAQYTSALLAGTITSGWTFGAGAALQIPFAMQMAYRFNGIGVTQNVLYE
NQKLIANQFNSAIGKIQDSLSSTASALGKLQDVVNQNAQALNTLVKQLSSN
FGAISSVLNDILSRLDKVEAEVQIDRLITGRLQSLQTYVTQQLIRAAEIRA
SANLAATKMSECVLGQSKRVDFCGKGYHLMSFPQSAPHGVVFLHVTYVPAQ
EKNFTTAPAICHDGKAHFPREGVFVSNGTHWFVTQRNFYEPQIITTDNTFV
SGNCDVVIGIVNNTVYDPLQPELDSFKEELDKYFKNHTSPDVDLGDISGIN
ASVVNIQKEIDRLNEVAKNLNESLIDLQELGKYEQYIKWPWYIWLGFIAGL
IAIVMVTIMLCCMTSCCSCLKGCCSCGSCCKFDEDDSEPVLKGVKLHYT

[1533] An example of a SARS COV2 N sequence (SEQ ID NO: 15) is shown below (sites for possible modification are bolded and underlined):

### >YP_009724397.2 Nucleocapsid Phosphoprotein [Severe Acute Respiratory Syndrome Coronavirus 2]

MSDNGPQNQRNAPRITFGGPSDSTGSNQNGERSGARSKQRRPQGLPNNTAS
WFTALTQHGKEDLKFPRGQGVPINTNSSPDDQIGYYRRATRRIRGGDGKMK
DLSPRWYFYYLGTGPEAGLPYGANKDGIIWVATEGALNTPKDHIGTRNPAN
NAAIVLQLPQGTTLPKGFYAEGSRGGSQASSRSSSRSRNSSRNSTPGSSRG
TSPARMAGNGGDAALALLLLDRLNQLESKMSGKGQQQQGQTVTKKSAAEAS
KKPRQKRTATKAYNVTQAFGRRGPEQTQGNFGDQELIRQGTDYKHWPQIAQ
FAPSASAFFGMSRIGMEVTPSGTWLTYTGAIKLDDKDPNFKDQVILLNKHI
DAYKTFPPTEPKKDKKKKADETQALPQRQKKQQTVTLLPAADLDDFSKQLQ
QSMSSADSTQA

[1535] An example of a SARS COV2 M sequence (SEQ ID NO: 16) is shown below (sites for possible modification for variant generation are bolded and underlined): >YP_009724393.1 membrane glycoprotein

### [Severe Acute Respiratory Syndrome Coronavirus 2]

MADSNGTITVEELKKLLEQWNLVIGFLFLTWICLLQFAYANRNRFLYIIKL
IFLWLLWPVTLACFVLAAVYRINWITGGIAIAMACLVGLMWLSYFIASFRL
FARTRSMWSFNPETNILLNVPLHGTILTRPLLESELVIGAVILRGHLRIAG
HHLGRCDIKDLPKEITVATSRTLSYYKLGASQRVAGDSGFAAYSRYRIGNY
KLNTDHSSSSDNIALLVQ

[1537] Using the above-described variables, candidate constructs will be developed and evaluated in nonclinical settings and then used for human clinical trials.

### LISTING OF EXEMPLARY ASPECTS OF THE INVENTION

[1538] The following is a non-limiting list of exemplary AOTI, intended to illustrate embodiments OTI in summary form. Such AOTIs include:

1. A CEPESC comprising EA(s) of NAM(s) comprising NS(s) comprising (1) gDPES(s); (2) AgES(s); and (3) ICITMES(s) (e.g., ITICITMES(s)); ICSTAPES(s) (e.g., ITICSTAPES(s)); or CPSTAPES(s).
2. The CEPESC of aspect 1, wherein NAM(s) comprise EAT-2 PPT ES(s).
3. The CEPESC of aspect 2, wherein the EAT-2 PPTs in the CEP comprise human EAT-2 PPTs (EL hEAT-2, a FF thereof, or a FV thereof).
4. A CEPESC comprising EA(s) of NAM(s) comprising NS(s) comprising (1) gDPES(s) and (2) AgES(s) wherein the AgES(s) encoding multiple Ag(s) that expressed in PE(s) comprising SCS(s), MSL(s), FL(s), MSFL(s), or CT.
5. A CEPESC comprising EA(s) of NAM(s) comprising NS(s) comprising (1) gDPES(s) and (2) AgES(s) wherein the AgES(s) encode CD4TCE(s) and CD8TCE(s), wherein the CD4TCE(s) and CD8TCE(s) in the CEP result in DOS CD4 TC IR(s), CD8 TC IR(s), and BC IR(s) when an EA of the composition is delivered to TR(s).
6. A CEPESC comprising EA(s) of NAM(s) comprising NS(s) comprising (1) gDPES(s); (2) AgES(s) wherein the AgES(s) encode Ag(s) comprising unnatural immunity Ag(s), AgV(s) from which decoy epitope(s) are removed, subdominant epitope(s), cryptic epitope(s), or CT.
7. A CEPESC comprising EA(s) of NAM(s) comprising NS(s) comprising (1) gDPES(s); (2) AgES(s) encoding AgV(s) including DIV(s).
8. The CEPESC of aspect 7, wherein the DIV(s) comprise GSRV(s).
9. A CEPESC comprising EA(s) of NAM(s) comprising NS(s) comprising (1) gDPES(s); (2) AgES(s); and (3) PTPSES(s), wherein the CEP comprises Ag(s) associated with ITS(s).
10. The CEPESC of aspect 9, wherein ITS(s) comprise PTPS(s).
11. The CEPESC of aspect 10, wherein the PTPS(s) comprise PolyUb(s).
12. A CEPESC comprising EA(s) of NAM(s) comprising NS(s) comprising (1) gDPES(s) and (2) AgES(s), wherein the gDP(s) (i) lack a gD TMD, (ii) exhibit DOS reduced affinity for HVEM than HSV-1 gD, or (iii) both (i) and (ii), and optionally comprises a gDSS.
13. A CEPESC comprising EA(s) of NAM(s) comprising NS(s) encoding gDAgFP(s) comprising gDS(s) and Ag(s) wherein Ag(s) are positioned downstream of any gDS(s) in gDAgFP(s).
14. A CEPESC comprising EA(s) of NAM(s) comprising NS(s) comprising (1) gDPES(s), (2) AgES(s), and (3) NGDPCIES(s).
15. The CEPESC of aspect 14, wherein the NGDPCI is a multimeric trap PPT.
16. The CEPESC of aspect 14 or aspect 15, wherein the NGDPCI blocks a CD112R or PD-1 checkpoint pathway.
17. A CEPESC comprising EA(s) of NAM(s) comprising NS(s) comprising (1) gDPES(s) and (2) AgES(s), and (3) NASM(s).
18. The CEPESC of aspect 17, wherein the NASM(s) comprise triclosan resistant marker ES(s).
19. The CEPESC according to any one of aspects 1-18, wherein the NS(s) comprise EEI(s) that DOS enhance expression of ES(s).
20. The CEPESC of aspect 19, wherein the NS(s) comprise SCUP(s) associated with EPES(s).
21. The CEPESC of any one of aspects 1-20, wherein the AgES(s) express Ag(s) that comprise CRA(s), PCRA(s), or both.
22. The CEPESC of any of aspects 1-21, where EP(s) comprise a NGDICRTS.
23. The CEPESC of aspect 22, wherein the NGDICRTS is a DEC-205-TS, such as a DEC-205-binding trap FP comprising Ag(s).
24. A CEPESC according to any one of aspects 1-23, wherein the CEPESC comprises EA(s) of at least two NAM(s), wherein the at least two NAM(s) comprise different ES(s) encoding different EP(s).
25. The CEPESC of aspect 24, where at least 1 NAM encodes a gDPAgFP and ≥1 other NAM encodes (a) Ag(s), (b) EAT-2 PPT(s), (c) NGDPCI(s), or (d) CT.
26. A CEPESC according to any of aspects 1-25, where NAM(s) are NAV(s).
27. A CEPESC according to aspect 26, wherein the NAM(s) are associated with CaPNPs, wherein the CaPNPs DOS enhance IR(s).
28. A CEPESC comprising features of 2 or more of aspects 1-27.
29. The CEPESC of aspect 28, wherein the CEPESC comprises features of aspect—643—and aspect 6 (i.e., (1) gDPES(s); (2) AgES(s); and (3) ICITMES(s) (e.g., ITICITMES(s)); ICSTAPES(s) (e.g., ITICSTAPES(s)); or CPSTAPES(s), wherein the AgES(s) encode Ag(s) comprising unnatural immunity Ag(s), AgV(s) from which decoy epitope(s) are removed, subdominant epitope(s), or CT).
30. The CEPESC of aspect 28, wherein the CEPESC comprises features of aspect 2 and aspect 8 (i.e., comprises EAT-2 PPT ES(s) and AgES(s) encoding DIV AgV(s) that comprise GSRV(s)).
31. The CEPESC of aspect 28, wherein the CEPESC comprises features of aspects 2 and 10 and one of aspects 14, 17, 19, 21, 22, and 28.
32. A CEPESC comprising features of 3 or more of aspects 1-27.
33. The CEPESC according to aspect 32, wherein the CEPESC comprises features of aspects 1, 9, and 19.
34. The CEPESC according to aspect 33, wherein the CEPESC comprises features of aspects 2, 10, and 19.
35. The CEPESC of aspect 32, wherein the CEPESC comprises features of aspects 1 & 4, and one of aspects 5, 6, 7, 9, 13, 14, 17, and 19.
36. The CEPESC according to aspect 32, wherein the CEPESC comprises features of aspects 1 and 9, and one of aspects 14, 17, and 19.
37. The CEPESC of aspect 32, wherein the CEPESC comprises features of aspects 1 and 7, and one of aspects 9, 14, 17, and 19.
38. The CEPESC of aspect 3233, wherein the CEPESC comprises features of aspects 12, and two of aspects 14, 17, and 28.
39. The CEPESC according to aspect 32, wherein the CEPESC comprises features of aspects 1 and 14 and one of aspects 1 and 17.
40. A CEPESC comprising features of 4 or more of aspects 1-28.
41. The CEPESC of aspect 40, wherein the CEPESC comprises features of aspects 2, 10, and 28 and one of aspects 4, 5, 6, 7, 14, 17, 19, 21, and 22.
42. The CEPESC of aspect 40, wherein the CEPESC comprises features of aspects 2, 10, and 19 and one of aspects 4, 5, 6, 7, 14, 17, 21, and 22.
43. The CEPESC of aspect 40, wherein the CEPESC comprises features of aspects 2, 7, and 10, and of aspects 4, 5, 6, 14, 17, 19, 21, and 22.
44. The CEPESC of aspect 40, wherein the CEPESC comprises features of aspects 2, 7, and 17, and 1 of aspects 4, 5, 6, 14, 19, 21, & 22.
45. The CEPESC of aspect 40, wherein the CEPESC comprises features of aspects 12, 17, and one of aspects 7, 14, 17, 19, 21, and 22.
46. The CEPESC of aspect 40, wherein the CEPESC comprises features of aspects 10, 19, 28, and one of aspects 4, 5, 6, 14, 17, 19, 21, and 22.
47. A CEPESC comprising features of 5 or more of aspects 1-28.
48. A CEPESC comprising features of 6 or more of aspects 1-28.
49. The CEPESC of aspect 48, wherein the CEPESC comprises features of aspects 2, 7, 10, 17, 19, and 28.
50. A CEPESC comprising features of 8 or more of aspects 1-28.
51. The CEPESC of aspect 48, wherein the CEPESC comprises features of aspects 2, 5, 7, 10, 17, 19, & 28 and one or more of aspects 6, 12, 13, & 21.
52. The CEPESC of aspect 48, wherein the CEPESC comprises features of aspects 2, 5, 7, 11, 18, 19, and 28 & 1 of aspects 6, 12, 21, 22, and 24.
53. The CEPESC of any one of aspects 1-52, wherein the CEPESC encodes 1 PPT that exhibits IR-inducing checkpoint modulation in TR(s).
54. The CEPESC of aspect 53, wherein the CEPESC encodes 2 PPTs that exhibit IR-inducing checkpoint modulation in TR(s).
55. The CEPESC of any one of aspects 1-123, where NS(s) encode 2 gDPs.
56. The CEPESC of aspect 55, wherein the CEPESC encodes 2 gDAgFPs.
57. The CEPESC of any one of aspects 1-56, wherein the NS(s) comprise ISNS(s) that DOS induce IR(s) in TR(s).
58. The CEPESC of any of aspects 1-57, where NS(s) encode NonCMIP(s).
59. The CEPESC of aspect 58, where NCMIP(s) PCGCOOCO Th1 cytokine(s).
60. The CEPESC of any one of aspects 1-60, wherein the CEPESC is characterized by (a) not encoding or comprising any mAb PPT; (b) not comprising viral sequences other than any gDSES(s), regulatory elements, or viral AgES(s); (c) not comprising or expressing any cytokine(s); or (d) a combination of (a)-(c).
61. The CEPESC of any one of aspects 1-60, wherein the CEPESC comprises NS(s) that encode(s) gDP(s) comprising enhanced nectin-1 binding WRT to HSV-1 gD; no detectable HVEM binding; or both.
62. The CEPESC of any one of aspects 1-60, wherein the NS(s) encode at least one gDP that consists essentially of a HVEMBD.
63. The CEPESC of any one of aspects 1-60, wherein the CEPESC encode(s) Ag-associated ITS(s), e.g., endosome TS(s), lysosome TS(s), ERTPS(s), or CT.
64. The CEPESC of any one of aspects 1-63, wherein the CEPESC encodes TCE(s) associated with flanking sequence(s); encodes editope(s); or both.
65. The CEPESC of any one of aspects—643-64, wherein the NS(s) encode DCA-associated BCE(s).
66. The CEPESC of aspect 65, wherein the Ag(s) comprising the BCE(s) are AgV(s) comprising a reduced number of BCEs WRT to its WTC.
67. The CEPESC of any one of aspects 1-64, wherein the NS(s) do not encode any known or readily identifiable DCA-associated BCEs.
68. The CEPESC of any 1 of aspects 1-67, wherein the NS(s) encode at least two PEs, 1 or both optionally forming part of gDAgFP(s).
69. The CEPESC of any one of aspects 1-68, wherein NS(s) encode dominant epitope(s) and subdominant epitope(s), wherein immunodominance is managed such that MGAOA Ag(s) in the CEP induce DOS IRs.
70. The CEPEC of any of aspects 1-69, where NS(s) are RNA(s).
71. The CEPESC of aspect 70, wherein the RNA is characterized by comprising (a) a polyA tail of about 100-200 nt, such as about 120-about 150 nt in length; (b) a 5′ cap that detectably enhances the stability of the RNA in TR(s); (c) a 7-methyl-guanosine residue joined to the 5′-end of the nucleotide sequence via a 5′-5′ triphosphate; (d) an expression-enhancing 5′ UTR (e.g., a HSP 70 5′ UTR); or CT.
72. The CEPESC of aspect 70 or aspect 71, wherein the RNA molecule comprises (a) one or more pseudouridine nucleosides, (b) an at least partial phosphorothioate backbone, or (c) a combination thereof.
73. The CEPESC of any one of aspects 1-73, wherein gDP(s) in the CEP comprise sequence(s) that are RVRHRSIOI to SEQ ID NO:64 or SEQ ID NO:56 and detectably bind(s) nectin-1 or a homolog thereof.
74. The CEPESC of aspect 74, wherein the gDP exhibits significantly reduced HVEM binding than HSV-1 gD.
75. The CEPESC of aspect 73 or aspect 74, wherein gDP(s) comprise sequence(s) that are RVRHRSIOI to SEQ ID NO: 78.
76. The CEPESC of any one of aspects 73-75, wherein gDP(s) do not comprise any sequence that exhibits more than about 60% amino acid sequence identity to SEQ ID NO: 77.
77. The CEPESC of aspect 76, wherein gDP(s) do not comprise any AARS that exhibits more than about 65% amino acid sequence identity to SEQ ID NO: 76.
78. The CEPESC of any one of aspects 1-77, wherein gDP(s) comprise sequence(s) that are RVRHRSIOI to SEQ ID NO:65.
79. The CEPESC of any one of aspects 1-78, wherein gDP(s) comprise sequence(s) that are RVRHRSIOI to SEQ ID NO:66.
80. The CEPESC of any one of aspects 1-79, wherein gDP(s) comprise sequence(s) that are RVRHRSIOI to SEQ ID NO:68.
81. The CEPESC of any one of aspects 1-80, wherein gDP(s) comprise sequence(s) that are RVRHRSIOI to SEQ ID NO:70.
82. The CEPESC of any one of aspects 1-81, wherein gDP(s) comprise sequence(s) that are RVRHRSIOI to SEQ ID NO:71.
83. The CEPESC of any one of aspects 1-82, wherein gDP(s) comprise sequence(s) that are RVRHRSIOI to SEQ ID NO:72.
84. The CEPESC of any one of aspects 1-83, wherein gDP(s) comprise sequence(s) that are RVRHRSIOI to SEQ ID NO:73.
85. The CEPESC of any one of aspects 1-84, wherein gDP(s) comprise sequence(s) that are RVRHRSIOI to SEQ ID NO:74.
86. The CEPESC of any one of aspects 1-77, wherein gDP(s) comprise sequence(s) RVRHRSIOI to SEQ ID NO:79 and that functions as a gDSS.
87. The CEPESC of any one of aspects 1-86, wherein gDP(s) in the CEP lack any functional gD TMD.
88. The CEPESC of aspect 87, wherein gDP(s) lack any sequence that is RVRHRSIOI to SEQ ID NO:81.
89. The CEPESC of aspect 87 or aspect 88, wherein gDP(s) lack any sequence RVRHRSIOI to SEQ ID NO:75.
90. The CEPESC of any one of aspects 1-89, wherein gDP(s) comprise sequence(s) that are RVRHRSIOI to SEQ ID NO:82.
91. The CEPESC of any one of aspects 1-90, wherein gDP(s) comprise a gDS that when analyzed PFAM, Interpro, or CDD Search is predicted to comprise a Herpesvirus glycoprotein D/GG/GX domain with an E-value of 10e−10 or less.
92. The CEPESC of any one of aspects 1-91, wherein the CEP comprises gDAgFP(s) comprising (a) a first gDS (gDS1) that is RVRHRSIOI to AAs 23-244 of HSV-1 gD & (b) a second gDS (gDS2) that is RVRHRSIOI to AAs 244-340 of HSV-1 gD, and (c) Ag(s) positioned between gDS1 and gDS2; Ag(s) positioned downstream of gDS2; or both.
93. The CEPESC of any one of aspects 1-92, wherein gDP(s) comprise gDS(s) that exhibit at least about 25% amino acid sequence identity and at least about 55% amino acid sequence similarity to SEQ ID NO:56, (iii) exhibits at least about 70% identity and at least about 75% sequence similarity to a sequence of at least one homolog of HSV-1 gD; and (iv) comprises a sequence according to the formula X1-X2-X3-X4-X5-X6-X7-X8-X9-X10-C-X12-X13-X14-X15-L-X17-X18-X19-X20-X22-X23-X24-X25-X26-X27-X28-X29-X30-X31-X32-X33-X34-X35-X36-X37-X38-W-X40-X41-X42-X43-X44-X45-X46-C-X48-X49-X50-X51-X52-X53-X54-X55-X56-X57-X58-C-X60-X61-X62-X63-X64-X65-X66-X67-C-X69-X70-X71-X72-X73-X74-X75-W-X78-X79-X80-X81-X82-X83-X84-X85-X86-X87-X88-X89-X90-X91-G-X93-X94-X95-X96-X97-P-X99-X100-X101-X102-G-X104-Y-X106-X107-X108-X109-X110-X111-X112-X113-X114-X115-X116-X117-X118-X119-X120-X121-X122, wherein (i) X2, X6, X7, X10, X15, X19, X23, X24, X27, X28, X42, X43, X44, X53, X57, X60, X64, X67, X69, X70, X73, X77, X79, X82, X86, X102, X110, X115, X116, and X117 can be any residue; (ii) X78 can be any residue or is absent; and (iii) X1 is V, T, or N, in one aspect is V or T; X3 is a Y or H; X4 an A, T, V, or L; X5 is a V, T, R, or I; X8 is empty or any residue (S); X9 is an R, A, D, or E; X12 is an R, D, G, or S; X13 is an S, M, V, F; X14 is V, L, or A; X17 is an N, I, or W; X18 is an A, S, or P; X20 is an S, P, T, or G; X21 is an E, Q, D, or N; X22 is an A, V, P, or I; X25 is I, T, L, V, or M; X26 is V, L, or I; X29 is an A, L, Q, or I; X30 is any 0-6 residues; X31 is a P, V, S, L or Q; X32 is any 0-7 residues; X33 is a Y or F; X34 is an N, R, D, or E; X35 is an L or A; X36 is a T, H, L, or S; X37 is an I, V, or L, X38 is an A, I, S or V; X40 is F or Y; X41 is R, K, or V; X45 is an N, G, D, A, or M; X46 is 0-6 of any residues; X48 is an A, G, E, or T, or is absent; X49 is an I, R, H, Y, or is absent; X50 is a P or L; X51 is a I, L, or M; X52 is a T, Y, L, or F; X54 is a M, I, R, or K; X55 is an E, D, or Q; X56 is a Y, F, or M; X58 is an E, D, N, or L; X61 is a Y, P, T, or D; X62 is an N, R, D, K, Q, or V; X63 is a K, Q, E, or R; X65 is an L or F; X66 is a G or S; X71 is an R, K, S, or Q; X72 is a T, N or S, in one aspect T or S; X74 is a P, G, S, D, or Q; X75 is an R, F, M, W, or Y; X80 is a Y, L, or S; X81 is a D, A, V, or T; X83 is an F, Y, T, or S; X84 is an S, A, M, or T; X85 is an A, Y, F, or L; X87 is an S, T, G, or G; X88 is an E, D, or R; X89 is a D or N; X90 is an N, E, or G; X91 is an L or A; X93 is a F or L; X94 is an L, I, V, or T; X95 is a M, I, F, or L; X96 is a H, A, V, M, or F; X97 is an A or S; X99 is an F, R, Q, P, or A; X100 is an E, L, F, or A; X101 is a T, V, N, or L; X104 is a T, Q, or L; X106 is an L, R, or T; X107 is an R or L; X108 is an L, A, V, or T; X109 is a V, L, or I; X111 is an I or V; X112 is an N, D, E, or G; X113 is a D, G, N, or R; X114 is a W, T, V, E, D, S, or F; X118 is a T, S, or A; X119 is a Q, D, or L; X120 is a F, I, or V; X121 is a I, M, L, or T; and X122 is a L, V, or F. (FORMULA 1).
94. The CEPESC of aspect 93, wherein the gDP(s) comprise(s) a sequence according to the formula X1-X2-X3-X4-X5-X6-X7-X8-X9-X10-C-X12-X13-X14-X15-L-X17-X18-X19-X20-X22-X23-X24-X25-X26-X27-X28-X29-X30-X31-X32-X33-X34-X35-X36-X37-X38-W-X40-X41-X42-X43-X44-X45-X46-C-X48-X49-X50-X51-X52-X53-X54-X55-X56-X57-X58-C-X60-X61-X62-X63-X64-X65-X66-X67-C-X69-X70-X71-X72-X73-X74-X75-W-X78-X79-X80-X81-X82-X83-X84-X85-X86-X87-X88-X89-X90-X91-G-X93-X94-X95-X96-X97-P-X99-X100-X101-X102-G-X104-Y-X106-X107-X108-X109-X110-X111-X112-X113-X114-X115-X116-X117-X118-X119-X120-X121-X122, wherein X1 is V, T, or N, in one aspect is V or T; X2 is Y, R, K; X3 is a Y or H; X4 an A, T, V, or L; X5 is a V, T, R, or I; X6 is an L, S, P, Y, or R; X7 is an E, A, L, T, D, M, or V; X8 is empty or any residue (S); X9 is an R, A, D, or E; X10 is an A, P, N, S, or G; X12 is an R, D, G, or S; X13 is an S, M, V, F; X14 is V, L, or A; X15 is an L, A, V, or E; X17 is an N, I, or W; X18 is an A, S, or P; X19 is a P, D, F, I, E, or N; X20 is an S, P, T, or G; X21 is an E, Q, D, or N; X22 is an A, V, P, or I; X23 is an P, G, D, V, K, or E; X24 is a Q, R, Y, A, S, or D; X25 is I, T, L, V, or M; X26 is V, L, or I; X27 is an R, W, N, L, or S; X28 is a G, E, S, T, or A; X29 is an A, L, Q, or I; X30 is any 0-6 residues; X31 is a P, V, S, L or Q; X32 is any 0-7 residues; X33 is a Y or F; X34 is an N, R, D, or E; X35 is an L or A; X36 is a T, H, L, or S; X37 is an I, V, or L, X38 is an A, I, S or V; X40 is F or Y; X41 is R, K, or V; X42 is M, I, T, L, or V; X43 is G, E, A, S, T, or I; X44 is G, S, D, R, K, Q, or D; X45 is an N, G, D, A, or M; X46 is 0-6 of any residues; X48 is an A, G, E, or T, or is absent; X49 is an I, R, H, Y, or is absent; X50 is a P or L; X51 is a I, L, or M; X52 is a T, Y, L, or F; X53 is a V, Y, F, L, or R; X54 is a M, I, R, or K; X55 is an E, D, or Q; X56 is a Y, F, or M; X57 is a T, A, Y, R, or F; X58 is an E, D, N, or L; X60 is a S, E, D, Q, or G; X61 is a Y, P, T, or D; X62 is an N, R, D, K, Q, or V; X63 is a K, Q, E, or R; X64 is a S, H, V, P, E, or L; X65 is an L or F; X66 is a G or S; X67 is an A, Y, R, T, or E; X69 is a P, R, K, S, A, or L; X70 is an I, Y, R, V, L, M, or K; X71 is an R, K, S, or Q; X72 is a T, N or S, in one aspect T or S; X73 is a Q, P, T, L, or A; X74 is a P, G, S, D, or Q; X75 is an R, F, M, W, or Y; X77 is an N, D, W, S, L, K, or A; X78 is absent or is a S, T, R, E, P, or V; X79 is a Y, F, P, R, S, or D; X80 is a Y, L, or S; X81 is a D, A, V, or T; X82 is an S, G, M, K, or P; X83 is an F, Y, T, or S; X84 is an S, A, M, or T; X85 is an A, Y, F, or L; X86 is a V, P, T, I, or L; X87 is an S, T, G, or G; X88 is an E, D, or R; X89 is a D or N; X90 is an N, E, or G; X91 is an L or A; X93 is a F or L; X94 is an L, I, V, or T; X95 is a M, I, F, or L; X96 is a H, A, V, M, or F; X97 is an A or S; X99 is an F, R, Q, P, or A; X100 is an E, L, F, or A; X101 is a T, V, N, or L; X102 is an A, E, S, D, or Q; X104 is a T, Q, or L; X106 is an L, R, or T; X107 is an R or L; X108 is an L, A, V, or T; X109 is a V, L, or I; X110 is a K, Y, S, I, V, T, or Q; X111 is an I or V; X112 is an N, D, E, or G; X113 is a D, G, N, or R; X114 is a W, T, V, E, D, S, or F; X115 is a T, V, N, P, F, M, or A; X116 is an E, A, I, T, F, or Q; X117 is I, Y, L, V, S, or T; X118 is a T, S, or A; X119 is a Q, D, or L; X120 is a F, I, or V; X121 is a I, M, L, or T; and X122 is a L, V, or F (FORMULA 2).
95. The CEPESC of aspect 94, wherein the gDP(s) comprise(s) a sequence according to the formula V-X2-X3-X4-X5-X6-X7-X8-X9-X10-Cr-X12-X13-X14-X15-L-X17-X18-X19-X20-X22-X23-X24-X25-X26-X27-X28-X29-X30-X31-X32-Y-X34-X35-X36-X37-X38-W-X40-X41-X42-X43-X44-X45-X46-C₂-X48-X49-X50-X51-X52-X53-X54-E-Y-X57-X58-C₃-X60-X61-X62-X63-X64-X65-G-X67-C₄-X69-X70-X71-X72-X73-X74-X75-W-X78-X79-X80-X81-X82-X83-X84-X85-X86-X87-X88-D-X90-L-G-X93-X94-X95-X96-X97-P-X99-X100-X101-X102-G-X104-Y-X106-R-X108-X109-X110-X111-X112-X113-X114-X115-X116-X117-X118-X119-X120-X121-X122, wherein C1-C4 are cysteines (but numbered for convenience of reference); X2 is Y, R, K; X3 is a Y or H; X4 an A, T, V, or L; X5 is a V, T, R, or I; X6 is an L, S, P, Y, or R; X7 is an E, A, L, T, D, M, or V; X8 is empty or any residue (S); X9 is an R, A, D, or E; X10 is an A, P, N, S, or G; X12 is an R, D, G, or S; X13 is an S, M, V, F; X14 is V, L, or A; X15 is an L, A, V, or E; X17 is an N, I, or W; X18 is an A, S, or P; X19 is a P, D, F, I, E, or N; X20 is an S, P, T, or G; X21 is an E, Q, D, or N; X22 is an A, V, P, or I; X23 is an P, G, D, V, K, or E; X24 is a Q, R, Y, A, S, or D; X25 is I, T, L, V, or M; X26 is V, L, or I; X27 is an R, W, N, L, or S; X28 is a G, E, S, T, or A; X29 is an A, L, Q, or I; X30 is any 0-6 residues; X31 is a P, V, S, L or Q; X32 is any 0-7 residues; X34 is an N, R, D, or E; X35 is an L or A; X36 is a T, H, L, or S; X37 is an I, V, or L, X38 is an A, I, S or V; X40 is F or Y; X41 is R, K, or V; X42 is M, I, T, L, or V; X43 is G, E, A, S, T, or I; X44 is G, S, D, R, K, Q, or D; X45 is an N, G, D, A, or M; X46 is 0-6 of any residues; X48 is an A, G, E, or T, or is absent; X49 is an I, R, H, Y, or is absent; X50 is a P or L; X51 is a I, L, or M; X52 is a T, Y, L, or F; X53 is a V, Y, F, L, or R; X54 is a M, I, R, or K; X57 is a T, A, Y, R, or F; X58 is an E, D, N, or L; X60 is a S, E, D, Q, or G; X61 is a Y, P, T, or D; X62 is an N, R, D, K, Q, or V; X63 is a K, Q, E, or R; X64 is a S, H, V, P, E, or L; X65 is an L or F; X67 is an A, Y, R, T, or E; X69 is a P, R, K, S, A, or L; X70 is an I, Y, R, V, L, M, or K; X71 is an R, K, S, or Q; X72 is a T, N or S, in one aspect T or S; X73 is a Q, P, T, L, or A; X74 is a P, G, S, D, or Q; X75 is an R, F, M, W, or Y; X77 is an N, D, W, S, L, K, or A; X78 is absent or is a S, T, R, E, P, or V; X79 is a Y, F, P, R, S, or D; X80 is a Y, L, or S; X81 is a D, A, V, or T; X82 is an S, G, M, K, or P; X83 is an F, Y, T, or S; X84 is an S, A, M, or T; X85 is an A, Y, F, or L; X86 is a V, P, T, I, or L; X87 is an S, T, G, or G; X88 is an E, D, or R; X90 is an N, E, or G; X93 is a F or L; X94 is an L, I, V, or T; X95 is a M, I, F, or L; X96 is a H, A, V, M, or F; X99 is an F, R, Q, P, or A; X100 is an E, L, F, or A; X101 is a T, V, N, or L; X102 is an A, E, S, D, or Q; X104 is a T, Q, or L; X106 is an L, R, or T; X108 is an L, A, V, or T; X109 is a V, L, or I; X110 is a K, Y, S, I, V, T, or Q; X111 is an I or V; X112 is an N, D, E, or G; X113 is a D, G, N, or R; X114 is a W, T, V, E, D, S, or F; X115 is a T, V, N, P, F, M, or A; X116 is an E, A, I, T, F, or Q; X117 is I, Y, L, V, S, or T; X118 is a T, S, or A; X119 is a Q, D, or L; X120 is a F, I, or V; X121 is a I, M, L, or T; and X122 is a L, V, or F (FORMULA 3).
96. The CEPESC of any of aspects 93-95, wherein the gD sequence further comprises a sequence downstream of X122 according to the formula Xa-C₅-X(1)-X(2)-Xb-X(3)-C₆, where Xa is any 6 to 8 residues; X(1) is Y and F; X(2) is A or S; Xb is any 7-11 AAs; & X(3) is A, L, or W (FORMULA 4).
97. The CEPESC of aspect [1250], wherein one or more of C1 and C5, C2 and C₆, and C₃ and C₄ form cysteine-cysteine double bonds.
98. The CEPESC of aspect [1251], wherein all of C1 and C5, C2 and C6, and C₃ and C₄ form cysteine-cysteine double bonds.
99. The CEPESC of any one of aspects [1250]-[1251], wherein the gD sequence further comprises a sequence downstream of the Formula 4 sequence according to the formula: V-X(4)-V-X(5)-X(6)-X(7)- G-X(8)- L-X(9)- P-X(10)-F-Xc-X(11)-V-X(12)-X(13)-X(14)-Y, wherein X(4) is any residue, in one aspect an S or T; X(5) is any residue, in one aspect an I; X(8) is any residue, in one aspect an M or a V; X(9) is absent or any residue; X(10) is any 1-2 residues, in one aspect comprising an E or a P; Xc is any 4-8 residues; X(11) is any residue, in one aspect a T or a V; X(12) is any residue, in one aspect an A or an N; X(13) is any residue; in one aspect a V, L, or is absent; X(14) is any residue, in one aspect an L or a W or is absent (FORMULA 5).
100. The CEPESC of aspect 99, wherein the Formula 5 sequence has a sequence according to the formula: V-T-V-D-S-I-G-M-L-X(9)-P-R-F-Xc-T-V-X(12)-X(13)-X(14)-Y (FORMULA 6).
101. The CEPESC of aspect 100, where the Formula 6 sequence further comprises a sequence per: S-Xd-G-V-T-V-D-S-I-G-M-L-X(9)-P-R—F-Xc-T-V-X(12)-X(13)-X(14)-Y, where Xd is any 5-6 AAs (FORMULA 7).
102. The CEPESC of aspects [1250]-[1251], wherein the gD sequence further comprises a sequence downstream of the Formula 4 sequence according to the formula Xx-V-T-V-D-S-I-G-M-L-P-R-F-Xy-T-V-Xz-Y, wherein Xx is any 6-10 residues, in one aspect 9 residues; Xy is any 5-9 residues, in one aspect 6 residues; and Xz is any 0-4 residues, in one aspect 2 residues (FORMULA 8).
103. The CEPESC of aspects 93-102, wherein the gDD sequence comprises a sequence upstream of the Formula 1, Formula 2, or Formula 3 sequence according to the formula: X.1-X.2-L-X.3-X.4-L-X(I)-V, wherein X.1 is any residue, in one aspect P or A; X.2 is any residue, in one aspect V or L; X.3 is any residue, in one aspect D or A; X.4 is any residue, in one aspect G or A; and X(I) is any about 7-9 residues (FORMULA 9).
104. The CEPESC of aspect 10³, wherein the Formula 9 sequence comprises a sequence per the formula: P-X.2-L-X.3-G-X.4-L-X(I)—V—Y-H (FORMULA 10).
105. The CEPESC of aspect 104, wherein the Formula 9 sequence comprises a sequence according to the formula: X.1-X.2-L-X.3-X.4-L-X(I)—V—X(II)—P-X.5-F-X.6-P-P-X.7-X.8-P-X.9-T, wherein X(II) is any 4-10 residues, X.5 is any residue or is absent, in one aspect T or is absent; X.6 is any residue, in one aspect Q or P; X.7 is any residue, in one aspect S or A; X.8 is any residue, in one aspect L or Y; and X.9 is any residue, in 1 aspect I or Y (FORMULA 11).
106. The CEPESC of aspects 93-102, wherein the gDD sequence comprises a sequence upstream of the Formula 1, Formula 2, or Formula 3 sequence per the formula: P-X-L-X-R-X-X-X-X-X-X-X-X-R-V-Y-H (FORMULA 12).
107. The CEPESC of any one of aspects 1-106, wherein any gDPAgFP encoded by NSs of the CEPESC lacks a gD profusion domain.
108. The CEPESC of aspects 1-107, wherein gDP(s) comprise gDS(s) including a first set of residues and a second set of residues that map to within about 5 angstroms of the patch1&patch 2 nectin-1 binding domains of HSV-1 gD or HSV-gD when structurally aligned (e.g., HSV-2 gD patch1 residues comprising P23, L25 to Q27, F223, N227, V231, and Y234 and HSV-2 gD patch 2 residues comprising R36 to H39, Q132, R134, P198, and V214 to R222).
109. The CEPESC of any one of aspects 93-108, wherein gDP(s) comprise gDS(s) that detectably bind HVEM under typical gD:HVEM binding conditions.
110. The CEPESC of any one of aspects 93-108, wherein gDP(s) do not bind HVEM under typical conditions.
111. A CEPESC according to any one of aspects 1-110, comprising gDP(s) that comprise a gDSS, a gD PFD, or both, and lacks any gD RBD.
112. The CEPESC of aspect 111, wherein the gDP(s) lacking any gD RBD comprise a NGD RBD, such as a ITICRTS, e.g., a DEC-205-binding domain, a PD-1 binding domain, or a CD112R binding domain.
113. The CEPESC of any one of aspects 1-112, wherein the CEP comprises 2 polyubiquitin sequences, each of the ≥2 polyUb sequences being AW Ag(s).
114. The CEPESC of any of aspects 1-113, where the CEPESC encodes degron(s).
115. The CEPESC of any one of aspects 1-114, wherein the CEPESC comprises 3+ NAM(s) comprising different NSs, at least two of the NAM(s) comprising NSs encoding different EPs (e.g., a 1^{st} NAM comprising a gDAgFPES; a 2^{nd} NAM comprising an EAT-2 PPT ES; and a 3^{rd} NAM comprising an ISNS, a NS comprising a NGDPCIES, or a CT).
116. The CEPESC of any one of aspects 1-115, wherein gDP(s) of the CEP are MCRT gD(s) of α-HVs that typically infect a first type of TR and MGASAOA of the Ag(s) are associated with DCA(s) that infect or are of a second type of TR, wherein the 1^{st} & 2^{nd} types of TRs are different species.
117. The CEPESC of any one of aspects 1-116, wherein EP(s) comprise DIV(s) and the CEPESC produces DOS reduced CSAE(s) in TR(s).
118. The CEPESC of aspect 117, wherein an EA of the CEPESC does not result in more than 15%, 10%, or 5% occurrence of CSAE(s) in TR(s).
119. The CEPESC of aspect 118, wherein CSAE(s) comprise Vaccine-Associated Enhanced Respiratory Disease (VAERD).
120. The CEPESC of any one of aspects 1-119, wherein the NS(s) encode an EAT-2 PPT according to M-D-L-P-Y-Y-H-G-Xα-L-T-K-X1-X2-C-E-X3-L-L-L-K-Xα-G-V-D-G-N-F-L-X4-R-D-S-E-S-X5-P-G-X6-L-C-L-C-V-S-F—K-X7-X8-V—Y-X9-Y—R—I-F-R-E-K-H-G-Y—Y-R-I-Q-T-Xα-Xa-Xα-X10-P-X11-Xα-X12-F—P-X13-L-X14-E-L-X15-S—K-X16-Xα-K—P-X17-Q-G-X18-V—V-H-L-Xα-X19-P-I-Xα-R-X20-X21-Xα-Xa-Xα-R-Xα-R-G-X22-X23-L-E-L-X24-X25-X26-Xα-N-X27-X28-Xα-X29-Y-V-D-V-L-P (SEQ ID NO: X, FORMULA Z), wherein Xa represents any AA, X1 is Q or R; X2 is D or E; X3 is T or A; X4 is L or I; X5 is I or V; X6 is V or A; X7 is N or K; X8 is I or L; X9 is T or S; X10 is S or T; X11 is K or R; X12 is V or I; X13 is S or N; X14 is K or Q; X15 is I or V; X16 is F or Y; X17 is N or G; X18 is M or L; X19 is K or N; X20 is T or N; X21 is S or N; X22 is L or M; X23 is K or E; X24 is E or N; X25 is T or V; X26 is F or Y; X27 is S or T; X28 is N or D; and X29 is D or E.
121. The CEPESC of any one of aspects 1-120, wherein gDP(s) comprise a sequence that is SVSHSOCE to a gDS comprising SEQ ID NO: 56.
122. The CEPESC of any one of aspects 1-121, wherein the Ag(s) expressed by the AgES(s) comprise cancer Ag(s).
123. The CEPESC of any one of aspects 1-121, wherein Ag(s) encoded by the AgES(s) comprise pathogen-associated Ag(s).
124. The CEPESC of aspect 123, where Ag(s) CPCGCOOCO ASFV Ag(s).
125. The CEPESC of aspect 124, wherein the ASFV Ag(s) comprise sequence(s) of 8 AAs that is HRSIOI to a sequence of SEQ ID NO:23.
126. The CEPESC of aspect 124, wherein the ASFV Ag(s) comprise sequence(s) of 20 AAs that is HRSIOI to a portion of SEQ ID NO:23.
127. The CEPESC of aspect 126, wherein ASFV Ag(s) comprise a sequence of 50 amino that is HRSIOI to a portion of SEQ ID NO:23.
128. The CEPESC of aspect 124, wherein the CEPESC comprises ASFV Ag(s) that are HRSIOI to ≥8 AAs, ≥12 AAs, or ≥20 AAs, of SEQ ID NO:237.
129. The CEPESC of any one of aspects 124-128, wherein the ASFV Ag(s) comprise GSRAgV(s).
130. The CEPESC of aspect 129, wherein the CEPESC comprises ASFV Ag(s) that are HRSIOI to sequence(s) of 8 AAs of SEQ ID N01237 comprising AAs 382-384, 1150-1152, or both, wherein N382, N1150, or both are substituted (e.g., with a D residue).
131. The CEPESC of aspect 129, wherein ASFV Ag(s) comprise ≥8 AAs, ≥12 AAs, or ≥20 AAs of SEQ ID NO:27.
132. The CEPESC of aspect 129, wherein ASFV Ag(s) comprise ≥8 AAs, ≥12 AAs, or ≥20 AAs of SEQ ID NO:28.
133. The CEPESC of any one of aspects 124-130, wherein the CEP comprises ASFV Ag(s) comprising sequence(s) HRSIOI to sequences of ≥8 AAs, ≥12 AAs, 20 AAs one or more of SEQ ID NOs: 238-422.
134. The CEPESC of any one of aspects 124-133, wherein ASFV Ag(s) comprise an EL WT ASFV CP204 L ORF EP, a FF, or a FV.
135. The CEPESC of any one of aspects 124-134, wherein the CEP comprises Ag(s) that are HRSIOI to a EL WT ASFV p32/p30 protein.
136. The CEPESC of any one of aspects 124-135, wherein the CEP comprises epitope(s) from or that are HRSIOI to epitope(s) of ASFV ORF CP530R, ASFV ORF E183 L,ASFVORF EP402R, ASFV ORF B646,or CT.
137. The CEPESC of any one of aspects 124-136, wherein the CEP comprises ASFV Ag(s) that are HRSIOI to a sequence of 8 AAs, ≥12 AAs, or 20 AAs of an EL WT ASFV p32, p54, pp 62 or p72 protein.
138. The CEPESC of any one of aspects 124-137, wherein ASFV Ag(s) are encoded by a portion of SEQ ID NO: 423. 139. The CEPESC of aspect 123, wherein Ag(s) CPCGCOSCOOCO PCV Ag(s).
140. The CEPESC of aspect 139, wherein PCV Ag(s) comprise an expression product of a PCV ORF1 sequence or an antigenic variant thereof.
141. The CEPESC of aspect 139 or aspect 140, wherein at least one of the PCV Ag(s) is an EP of a PCV ORF2 sequence or a FV thereof.
142. The CEPESC of any one of aspects 139-141, wherein PCV Ags comprise expression products of at least two PCV ORFs.
143. The CEPESC of any of aspects 139-142, wherein the PCV Ags include the expression products of PCV ORFs 1 and 3.
144. The CEPESC of any of aspects 139-143, wherein the PCV Ags comprise expression products of PCV ORFs 1 and 4.
145. The CEPESC of any of aspects 139-144, wherein PCV Ags comprise expression products of PCV ORFs 2 and 3.
146. The CEPESC of any of aspects 139-145, wherein the PCV Ags comprise the expression products of PCV ORFs 2 and 4.
147. The CEPESC of any of aspects 139-146, wherein the PCV Ags comprise expression products of PCV ORFs 3 and 4.
148. The CEPESC of any one of aspects 139-147, wherein the PCV antigens comprise expression products from (a) a PCV ORF1, (b) a PCV ORF2, and (c) a PCR ORF3, a PCV ORF4, or a combination thereof.
149. The CEPESC of any one of aspects 139-148, wherein PCV Ag(s) comprise expression products of ≥1 of PCV ORFS, ORF6, ORF7, ORF8, ORF10, ORF11, and ORF12.
150. The CEPESC of any of aspects 139-149, wherein PCV Ag(s) comprise ≥8, ≥12, or ≥20 AAs of a sequence HRSIOI to SEQ ID NO: 24.
151. The CEPESC of any one of aspects 139-150, wherein the Ag(s) comprise ≥1 of SEQ ID NOs: 143-154 or FF(s)/FV(s) thereof.
152. The CEPESC of any one of aspects 139-151, wherein PCV Ag(s) are RVRHRSIOI to one or more of SEQ ID NOs:654, 658-659, & 661-664.
153. The CEPESC of aspect 151, wherein PCV Ag(s) comprise ≥1 GSRAgV(s).
154. The CEPESC of aspect 153, wherein the PCV antigens comprise a PCV ORF2Δ143-145 sequence.
155. The composition of aspect 153, wherein the NSs encode SEQ ID NO: 25.
156. The CEPESC of aspect 152, wherein PCV Ag(s) comprise one or more of SEQ ID NOS: 655-657, 660, and 666 or FFs or FVs thereof.
157. The CEPESC of any one of aspects 139-156, wherein PCV Ag(s) comprise Ag(s) according to the formula of SEQ ID NO:667.
158. The CEPESC of any one of aspects 139-157, wherein PCV Ag(s) comprise PCV-2d Ag(s).
159. The CEPESC of any one of aspects 139-158, wherein PCV Ag(s) comprise PCV-3 Ag(s).
160. The CEPESC of aspect 159, wherein PCV Ag(s) comprise at least 8 AAs of SEQ ID NO:155, SEQ ID NO:156, or both.
161. The CEPESC of aspect 159 or aspect 160, wherein PCV-3 Ag(s) are encoded by a portion of SEQ ID NO: 157. 162. The CEPESC of aspect 159, wherein PCV-3 Ag(s) comprise GSRAgV(s).
163. The CEPESC of aspect 162, wherein PCV-3 Ag(s) comprise at least 8 AAs of SEQ ID NO:439, comprising residues 16-18 thereof; at least 8 AAs of SEQ ID NO:440 comprising residues 124-126 thereof; or a portion of SEQ ID NO:441 comprising AAs 16-126 thereof.
164. The CEPESC of aspect 123, wherein Ag(s) CPCGCOSCOOCO PRRSV Ag(s).
165. The CEPESC of aspect 164, where PRRSV Ag(s) comprise ORF3 Ag(s).
166. The CEPESC of aspect 164 or aspect 165, wherein PRRSV Ag(s) comprise PRRSV GP3 sequence(s).
167. The CEPESC of any one of aspects 164-166, wherein PRRSV Ag(s) comprise PRRSV ORF1a Ag(s).
168. The CEPESC of any one of aspects 164-167, wherein PRRSV Ag(s) comprise PRRSV nsp7 sequence(s).
169. The CEPESC of any one of aspects 164-168, wherein PRRSV Ag(s) comprise PRRSV nsp7 sequence(s).
170. The CEPESC of any one of aspects 164-169, wherein PRRSV Ag(s) comprise PRRSV nsp7 sequence(s).
171. The CEPESC of any one of aspects 164-170, wherein PRRSV Ag(s) comprise PRRSV ORF7 Ag(s).
172. The CEPESC of any one of aspects 164-171, wherein PRRSV Ag(s) comprise PRRSV protein N sequence(s).
173. The CEPESC of any one of aspects 164-172, wherein PRRSV Ag(s) comprise PRRSV envelope glycoprotein GP2 (ORF2) Ag(s).
174. The CEPESC of any one of aspects 164-173, wherein PRRSV Ag(s) comprise PRRSV envelope glycoprotein GP4 (ORF4) Ag(s).
175. The CEPESC of any one of aspects 164-174, wherein PRRSV Ag(s) comprise PRRSV nucleocapsid protein ORF7.
176. The CEPESC of any one of aspects 164-175, wherein PRRSV Ag(s) comprise PRRSV ORF1a′ sequence(s), PRRSV ORF1b sequence(s), PRRSV ORF2a sequence(s), PRRSV ORF2b sequence(s), PRRSV ORF4 sequence(s), PRRSV ORF5 sequence(s), PRRSV ORF5a sequence(s), PRRSV ORF6 sequence(s), or CT.
177. The CEPESC of any one of aspects 164-176, wherein PRRSV Ag(s) comprise Ag(s) of AAs 1-100 of a PRRSV ORF3 sequence.
178. The CEPESC of any one of aspects 164-177, wherein PRRSV Ag(s) comprise PRRSV NSP1α sequence(s) or NSP1β sequence(s).
179. The CEPESC of any one of aspects 164-178, wherein PRRSV Ag(s) comprise PRRSV NSP2 sequence(s).
180. The CEPESC of any one of aspects 164-179, wherein PRRSV Ag(s) comprise PRRSV NSP3 sequence(s).
181. The CEPESC of any one of aspects 164-167, wherein PRRSV Ag(s) comprise PRRSV NSP4 sequence(s), NSP5 sequence(s), NSP7α sequence(s), NSP7β sequence(s), NSP8 sequence(s), NSP9 sequence(s), NSP10 sequence(s), NSP11 sequence(s), NSP12 sequence(s), or CT.
182. The CEPESC of any one of aspects 164-167, wherein PRRSV Ag(s) comprise 1+ of SEQ ID NOs: 120-132 or FF/FV(s) thereof.
183. The CEPESC of any one of aspects 164-182 wherein the PRRSV Ag(s) comprise ≥8, ≥12, ≥20 AAs of SEQ ID NO:11 or a FV thereof.
184. The CEPESC of any of aspects 164-183, wherein the PRRSV Ag(s) comprise GSRAgV(s).
185. The CEPESC of any one of aspects 184, wherein the PRRSV Ag(s) comprise ≥8, ≥12, ≥20 AAs of SEQ ID NO:12 or a FV thereof.
186. The CEPESC of any one of aspect 185 wherein the PRRSV Ag(s) comprise ≥8, ≥12, ≥20 AAs of SEQ ID NO:13 or a FV thereof.
187. The CEPESC of aspect 184, where the PRRSV Ag(s) comprise sequence(s) of ≥8, ≥12, ≥20 AAs of a sequence according to the formula

MVNSCTFLHIFLCCSFLYSFCCAVVAGSX1TTYCFWFPLVRGX2FSFELTV
X3YTVCPPCLTRQAATEIYEPGRSLWCRIGYDRCGEDDHDELGFMIPPGLS
SEGHLTSVYAWLAFLSFSYTAQFHPEIFGIGX4VSRVYVDIKHQLICAEHD
GQX5TTLPRHDX6ISAVFQTYYQHQVDGGNWFHLEWLRPFFSSWLVLX7VS
WFLRRSPANHVSVRVLQILRPTPPQRQALLSSKTSVALGIATRPLRRFAKS
LSAVRR,

wherein X1-X7 are D/N, 1 of X1-X7 are D, less than all of X1-X7 are D, and Ag(s) comprise ≥1 of any of X1-X7 or CT, or a FV.
188. The CEPESC of aspect 184, wherein the PRRSV Ag(s) comprise ≥8, ≥12, ≥20 AAs of a sequence according to the formula

SLCQVIEDCCCSQX1KTNRVTPEEVAAKIDLYLRGATNLEECLARLEKARP
PRVIDTSFDWDVVLPGVEAATQTIKLPQVNQCRALVPVVTQKSLDX2NSVP
LTAFSLANYYYRAQGDEVRHRERLTAVLSKLEKVVREEYGLMPTEPGPRPT
LPRGLDELKDQMEEDLLKLANAQTTSDMMAWAVEQVDLKTWVKNYPRWTPP
PPPPKVQPRKTKPVKSLPERKPVPAPRRKVGSDCGSPVSLGGDVPNSWEDL
AVSSPFDLPTPPEPATPSSELVIVSSPQCIFRPATPLSEPAPIPAPRGTVS
RPVTPLSEPIPVPAPRRKFQQVKRLSSAAAIPPYQDEPLDLSASSQTEYEA
SPPAPPQSGGVLGVEGHEAEETLSEISDMSGNIKPASVSSSSSLSSVRITR
PKYSAQAIIDSGGPCSGHLQEVKETCLSVMREACDATKLDDPATQEWLSRM
WDRVDMLTWRX3TS,

wherein X1-X3 are D or N and ≥1 of X1-X3 are D, or a FV.
189. The CEPESC of aspect 184, wherein the CEPESC comprises at least a portion of SEQ ID NO: 427 comprising AAs 51-53 thereof.
190. The CEPESC of aspect 184, wherein the PRRSV Ag(s) comprise ≥8, ≥12, ≥20 AAs of a sequence according to the formula

X1RTFTLGPVNLKVASEVELKDAVEHNQHPVARPIDGGVVLLRSAVPSLID
VLISGADASPKLLAHHGPGNTGIDGTLWDFESEATKEEVALSAQIIQACDI
RRGDAPEIGLPYKLYPVRGNPERVKGVLQNTRFGDIPYKTPSDTGSPVHAA
ACLTPX2ATPVTDGRSVLATTMPPGFELYVPTIPASVLDYLDSRPDCPKQL
TEHGCEDAALKDLSKYDLSTQGFVLPGVLRLVRKYLFAHVGKCPPVHRPST
YPAKNSMAGINGNRFPTKDIQSVPEIDVLCAQAVRENWQTVTPCTLKKQYC
GKKKTRTILGTNNFIALAHRAVLSGVTQGFMKKAFNSPIALGKNKFKELQT
PVLGRCLEADLASCDRSTPAIVRWFAANLLYELACAEEHLPSYVLNCCHDL
LVTQSGAVTKRGGLSSGDPITSVSNTIYSLVIYAQHMVLSYFKSGHPHGLL
FLQDQLKFEDMLKVQPLIVYSDDLVLYAESPTMPNYHWWVEHLNLMLGFQT
DPKKTAITDSPSFLGCRIINGRQLVPNRDRILAALAYHMKASX3VS,

wherein X1-X3 are D or N and ≥1 of X1-X3 are D, or a FV.
191. The CEPESC of aspect 184, wherein the CEPESC comprises at least a portion of SEQ ID NO: 429 comprising AAs 300-302 thereof.
192. The CEPESC of aspect 184, wherein the CEPESC comprises at least a portion of SEQ ID NO: 430 comprising AAs 21-23 thereof.
193. The CEPESC of aspect 184, wherein the PRRSV Ag(s) comprise ≥8, ≥12, ≥20 AAs of a sequence according to the formula

X1TSPLADKEEKIFRFGSHKWYGAGKRARKARSCATATVAGRALSVRETRQ
AKEHEVAGANKAEHLKHYSPPAEGNCGWHCISAIANRMVNSKFETTLPERV
RPPDDWATDEDLVNAIQILRLPAALDRNGACTSAKYVLKLEGEHWTVTVTP
GMSPSLLPLECVQGCCGHKGGLGSPDAVEVSGFDPACLDRLAEVMHLPSSA
IPAALAEMSGDSDRSASPVTTVWTVSQFFARHSGGNHPDQVRLGKIISLCQ
VIEDCCCSQX2KTNRVTPEEVAAKIDLYLRGATNLEECLARLEKARPPRVI
DTSFDWDVVLPGVEAATQTIKLPQVNQCRALVPVVTQKSLDX3NSVPLTAF
SLANYYYRAQGDEVRHRERLTAVLSKLEKVVREEYGLMPTEPGPRPTLPRG
LDELKDQMEEDLLKLANAQTTSDMMAWAVEQVDLKTWVKNYPRWTPPPPPP
KVQPRKTKPVKSLPERKPVPAPRRKVGSDCGSPVSLGGDVPNSWEDLAVSS
PFDLPTPPEPATPSSELVIVSSPQCIFRPATPLSEPAPIPAPRGTVSRPVT
PLSEPIPVPAPRRKFQQVKRLSSAAAIPPYQDEPLDLSASSQTEYEASPPA
PPQSGGVLGVEGHEAEETLSEISDMSGNIKPASVSSSSSLSSVRITRPKYS
AQAIIDSGGPCSGHLQEVKETCLSVMREACDATKLDDPATQEWLSRMWDRV
DMLTWRX4TSVYQAICTLDGRLKFLPKMILETPPPYPCEFVMMPHTPAPSV
GAESDLTIGSVATEDVPRILEKIENVGEMANQGPLAFSEDKPVDDQLVNDP
RISSRRPDESTSAPSAGTGGAGSFTDLPPSDGADADGGGPFRTVKRKAERL
FDQLSRQVFDLVSHLPVFFSRLFYPGGGYSPGDWGFAAFTLLCLFLCYSYP
AFGIAPLLGVFSGSSRRVRMGVFGCWLAFAVGLFKPVSDPVGAACEFDSPE
CRNILHSFELLKPWDPVRSLVVGPVGLGLAILGRLLGGARCIWHFLLRLGI
VADCILAGAYVLSQGRCKKCWGSCIRTAPNEVAFNVFPFTRATRSSLIDLC
DRFCAPKGMDPIFLATGWRGCWAGRSPIEQPSEKPIAFAQLDEKKITARTV
VAQPYDPNQAVKCLRVLQAGGAMVAKAVPKVVKVSAVPFRAPFFPTGVKVD
PDCRVVVDPDTFTAALRSGYSTTNLVLGVGDFAQLNGLKIRQISKPSGGGP
HLMAALHVACSMALHMLAGIYVTAVGSCGTGTNDPWCANPFAVPGYGPGSL
CTSRLCISQHGLTLPLTALVAGFGIQEIALVVLIFVSIGGMAHRLSCKADM
LCVLLAIASYVWVPLTWLLCVFPCWLRCFSLHPLTILWLVFFLISVNMPSG
ILAMVLLVSLWLLGRYTNVAGLVTPYDIHHYTSGPRGVAALAIAPDGTYLA
AVRRAALTGRTMLFTPSQLGSLLEGAFRTRKPSLNTVNVIGSSMGSGGVFT
IDGKVKCVTAAHVLTGNSARVSGVGFNQMLDFDVKGDFAIADCPNWQGAAP
KTQFCTDGWTGRAYWLTSSGVEPGVIGKGFAFCFTACGDSGSPVITEAGEL
VGVHTGSNKQGGGIVTRPSGQFCNVAPIKLSELSEFFAGPKVPLGDVKVGS
HIIKDISEVPSDLCALLAAKPELEGGLSTVQLLCVFFLLWRMMGHAWTPLV
AVSFFILNEVLPAVLVRSVFSFGMFVLSWLTPWSAQVLMIRLLTAALNRNR
WSLAFFSLGAVTGFVADLAATQGHPLQAVMX5LSTYAFLPRMMVVTSPVPV
ITCGVVHLLAIILYLFKYRGPHHILVGDGVFSAAFFLRYFAEGKLREGVSQ
SCGMNHESLTGALAMRLNDEDLDFLMKWTNFKCFVSASNMRNAAGQFIEAA
YAKALRVELAQLVQVDKVRGTLAKLEAFADTVAPQLSPGDIVVALGHTPVG
SIFDLKVGSTKHTLQAIETRVLAGSKMTVARVVDPTPTPPPAPVPIPLPPK
VLENGPNAWGDEDRLNKKKRRRMEALGIYVMGGKKYQKFWDKNSGDVFYEE
VHX6NT,

wherein X1-X6 are D or N and at least 1 of X1-X6 are D, or a FV.
194. The CEPESC of aspect 184, wherein the PRRSV Ag(s) comprise ≥8, ≥12, ≥20 AAs of a sequence according to the formula

X1RTFTLGPVNLKVASEVELKDAVEHNQHPVARPIDGGVVLLRSAVPSLID
VLISGADASPKLLAHHGPGNTGIDGTLWDFESEATKEEVALSAQIIQACDI
RRGDAPEIGLPYKLYPVRGNPERVKGVLQNTRFGDIPYKTPSDTGSPVHAA
ACLTPTDGRSVLATTMPPGFELYVPTIPASVLDYLDSRPDCPKQLTEHGCE
DAALKDLSKYDLSTQGFVLPGVLRLVRKYLFAHVGKCPPVHRPSTYPAKNS
MAGINGNRFPTKDIQSVPEIDVLCAQAVRENWQTVTPCTLKKQYCGKKKTR
TILGTNNFIALAHRAVLSGVTQGFMKKAFNSPIALGKNKFKELQTPVLGRC
LEADLASCDRSTPAIVRWFAANLLYELACAEEHLPSYVLNCCHDLLVTQSG
AVTKRGGLSSGDPITSVSNTIYSLVIYAQHMVLSYFKSGHPHGLLFLQDQL
KFEDMLKVQPLIVYSDDLVLYAESPTMPNYHWWVEHLNLMLGFQTDPKKTA
ITDSPSFLGCRIINGRQLVPNRDRILAALAYHMKASX2VSEYYASAAAILM
DSCACLEYDPEWFEELVVGIAQCARKDGYSFPGTPFFMSMWEKLRSNYEGK
KSRVCGYCGAPAPYATACGLDVCIYHTHFHQHCPVTIWCGHPAGSGSCSEC
KSPVGKGTSPLDEVLEQVPYKPPRTVIMHVEQGLTPLDPGRYQTRRGLVSV
RRGIRGNEVELPDGDYASTALLPTCKEINMVAVASNVLRSRFIIGPPGAGK
TYWLLQQVQDGDVIYTPTHQTMLDMIRALGTCRFNVPAGTTLQFPVPSRTG
PWVRILAGGWCPGKNSFLDEAAYCNHLDVLRLLSKTTLTCLGDFKQLHPVG
FDSHCYVFDIMPQTQLKTIWRFGQNICDAIQPDYRDKLMSMVX3TTRVTYV
EKPVRYGQVLTPYHRDREDDAITIDSSQGATFDVVTLHLPTKDSLNRQRAL
VAITRARHAIFVYDPHRQLQGLFDLPAKGTPVNLAVHRDGQLIVLDRNNKE
CTVAQALGNGDKFRATDKRVVDSLRAICADLEGSSSPLPKVAHNLGFYFSP
DLTQFAKLPVELAPHWPVVTTQNNEKWPDRLVASLRPIHKYSRACIGAGYM
VGPSVFLGTPGVVSYYLTKFVKGEAQVLPETVFSTGRIEVDCREYLDDRER
EVAASLPHAFIGDVKGTTVGGCHHVTSRYLPRVLPKESVAVVGVSSPGKAA
KALCTLTDVYLPDLEAYLHPETQSKCWKMMLDFKEVRLMVWKDKTAYFQLE
GRYFTWYQLASYASYIRVPVX4ST,

wherein X1-X4 are D or N and at least one of X1-X4 are D, or a FV.
195. The CEPESC of aspect 184, wherein the PRRSV Ag(s) comprise ≥8, ≥12, ≥20 AAs of a sequence according to the formula

VVAHFQHLAAIEAETCKYLASRLPMLHNLRMTGSX1VTIVYX2STLNQVFA
IFPTPGSRPKLHDFQQWLIAVHSSIFSSVAASCTLFVVLWLRVPILRTVFG
FRWLGAIFLSNSQ,

wherein X1 & X2 are D or N, and at least one of X1 & X2 are D, or a FV.
196. The CEPESC of aspect 184, wherein PRRSV Ag(s) comprise ≥8, ≥12, or ≥20 AAs of a sequence according to the formula

MVNSCTFLHIFLCCSFLYSFCCAVVAGSX1TTYCFWFPLVRGX2FSFELTV
X3YTVCPPCLTRQAATEIYEPGRSLWCRIGYDRCGEDDHDELGFMIPPGLS
SEGHLTSVYAWLAFLSFSYTAQFHPEIFGIGX4VSRVYVDIKHQLICAEHD
GQX5TTLPRHDX6ISAVFQTYYQHQVDGGNWFHLEWLRPFFSSWLVLX7VS
WFLRRSPANHVSVRVLQILRPTPPQRQALLSSKTSVALGIATRPLRRFAKS
LSAVRR,

where X1-X7 are D/N and 1+ of X1-X7 is D, or a FV.
197. The CEPESC of aspect 184, wherein the PRRSV Ag(s) comprise a sequence of at least 8 AAs and including 1+ of X1-X4 of the formula

MASSLLFLVVGFKCLLVSQAFACKPCFSSSLADIKTX1TTAAASFAVLQDI
SCLRHRDSASEAIRKIPQCRTAIGTPVYVTITAX2VTDENYLHSSDLLMLS
SCLFYASEMSEKGFKVVFGX3VSGIVAVCVX4FTSYVQHVKEFTQRSLVVD
HVRLLHFMTPETMRWATVLACLFAILLAI,

wherein X1-X4 are D or N, at least one of X1-X4 is D.
198. The CEPESC of aspect 184, wherein the PRRSV Ag(s) comprise a sequence of at least 8 AAs and including 1+ of X1-X4 of the formula

MLEKCLTAGCCSRLLSLWCIVPFCFAVLAX1ASX2DSSSHLQLIYX3LTLC
ELX4GTDWLANKFDWAVESFVIF,

wherein X1-X4 are D or N, ≥1 of X1-X4 is D, or a FV.
199. The CEPESC of aspect 184, wherein the PRRSV Ag(s) comprise ≥8 AAs or 20 AAs of SEQ ID NO:437 comprising AAs 144-146 thereof.
200. The CEPESC of aspect 184, wherein the PRRSV Ag(s) comprise ≥8 or 20 AAs of SEQ ID NO:438 comprising AAs 34-36 thereof.
201. The CEPESC of aspect 123, wherein the pathogen Ag(s) CPCGCOSCOOCO EHV Ag(s).
202. The CEPESC of aspect 201, wherein the EHV Ag(s) comprise EHV1 Ag(s).
203. The CEPESC of aspect 201 or aspect 202, wherein the EHV Ag(s) comprise EHV immediate early gene ICP4 epitope(s).
204. The CEPESC of aspects 201-203, wherein the EHV Ag(s) comprise EHV Tegument Protein α-TIF epitope(s).
205. The CEPESC of aspect 204, wherein the EHV Ag(s) comprise sequences of one or more of EHV Tegument Protein α-TIF portions ICP0, ICP22, and ICP2.
206. The CEPESC of aspects 201-205, wherein EHV Ag(s) comprise sequence(s) of at least 8 AAs of one of SEQ ID NOs: 158-237.
207. The CEPESC of aspects 201-206, wherein EHV Ag(s) comprise GSRAgV(s) comprising GSRV(s) in one or more of SEQ ID NOs: 159-160, 162-164, 166, 168-175, 178-181, 185, 187, 189-190, 194, 196, 198-200, 202-203, 206-207, 210-214, 218, 221, 224-225, 227-231, 233, and 234.
208. The CEPESC of aspects 201-206, wherein the EHV Ag(s) comprise at least 8 AAs of one of SEQ ID NOs: 442-449.
209. The CEPESC of aspect 123, wherein the pathogen Ag(s) CPCGCOSCOOCO coronavirus (COV) Ag(s).
210. The CEPESC of aspect 209, wherein COV Ag(s) are SARS-COV2 Ag(s).
211. The CEPESC of aspect 210, wherein COV Ag(s) comprise SARS-COV2 S protein Ag(s) or HR or SI FV(s) thereof.
212. The CEPESC of any one of aspects 209-211, wherein COV Ag(s) comprise ≥8, ≥12, or ≥20 AAs of SEQ ID NO: 14 or a FV thereof.
213. The CEPESC of aspects 209-212, wherein COV Ag(s) comprise ≥8, ≥12, ≥20 AAs of a sequence according to the formula

(SEQ ID NO: 20)
MFVFLVLLPLVSSQCVX₁LTTRTQLPPAYTNSFTRGVYYPDKVFRSSVLHS
TQDLFLPFFSX₂VTWFHAIHSGTX₃GTKRFDNPVLPFNDGVYFASTEKSNI
IRGWIFGTTLDSKTQSLLIVNX₄ATNVVIKVCEFQFCNDPFLGVYYHKN
X₅KSWMESEFRVYSSANX₅CTFEYVSQPFLMDLEGKQGNFKNLREFVFKNI
DGYFKIYSKHTPINLVRDLPQGFSALEPLVDLPIGIX₆ITRFQTLLALHR
SYLTPGDSSSGWTAGAAAYYVGYLQPRTFLLKYNEX₇GTITDAVDCALDP
LSETKCTLKSFTVEKGIYQTSNFRVQPTESIVRFPX₈ITNLCPFGEVFX₉
ATRFASVYAWNRKRISNCVADYSVLYNSASFSTFKCYGVSPTKLNDLCFT
NVYADSFVIRGDEVRQIAPGQTGKIADYNYKLPDDFTGCVIAWNSNNLDS
KVGGNYNYLYRLFRKSNLKPFERDISTEIYQAGSTPCNGVEGFNCYFPLQ
SYGFQPTNGVGYQPYRVVVLSFELLHAPATVCGPKKSTNLVKNKCVNFNF
NGLTGTGVLTESNKKFLPFQQFGRDIADTTDAVRDPQTLEILDITPCSFG
GVSVITPGTX₁₀TSNQVAVLYQDVX₁₁CTEVPVAIHADQLTPTWRVYSTGS
NVFQTRAGCLIGAEHVX₁₂NSYECDIPIGAGICA5YQTQTN5PRRARSVA
SQSIIAYTMSLGAENSVAYSX₁₃NSIAIPTX₁₄FTISVTTEILPVSMTKTS
VDCTMYICGDSTECSNLLLQYGSFCTQLNRALTGIAVEQDKNTQEVFAQ
VKQIYKTPPIKDFGGFX₁₅FSQILPDPSKPSKRSFIEDLLFNKVTLADAG
FIKQYGDCLGDIAARDLICAQKFNGLTVLPPLLTDEMIAQYTSALLAGT
ITSGWTFGAGAALQIPFAMQMAYRFNGIGVTQNVLYENQKLIANQFNSA
IGKIQDSLSSTASALGKLQDVVNQNAQALNTLVKQLSSNFGAISSVLND
ILSRLDKVEAEVQIDRLITGRLQSLQTYVTQQLIRAAEIRASANLAATK
MSECVLGQSKRVDFCGKGYHLMSFPQSAPHGVVFLHVTYVPAQEKX₁₆FT
TAPAICHDGKAHFPREGVFVSX₁₇GTHWFVTQRNFYEPQIITTDNTFVSG
NCDVVIGIVX₁₈X₁₉TVYDPLQPELDSFKEELDKYFKX₂₀HTSPDVDLGDIS
GIX₂₁ASVVNIQKEIDRLNEVAKNLX₂₂ESLIDLQELGKYEQYIKWPWYIW
LGFIAGLIAIVMVTIMLCCMTSCCSCLKGCCSCGSCCKFDEDDSEPVLK
GVKLHYT,

wherein X is D or N, and at least one of X₁-X₂₂ is a D (Formula I).
214. The CEPESC of aspect 213, wherein the COV Ag(s) comprise at least one of X₁-X₂₂ and 1+ D substitution of a corresponding N residue in SEQ ID NO: 14.
215. The CEPESC of any of aspects 209-214, wherein COV Ag(s) comprise a sequence of a SARS-COV2 N protein or a FV thereof.
216. The CEPESC of any of aspects 209-215, wherein COV Ag(s) comprise ≥8, ≥12, or ≥20 AAs of SEQ ID NO: 15 or a FV thereof.
217. The CEPESC of any of aspects 204-210, wherein COV Ag(s) comprise sequence(s) of ≥8, ≥12, or ≥20 AAs of the formula

(SEQ ID NO: 21)
MSDNGPQNQRNAPRITFGGPSDSTGSNQNGERSGARSKQRRPQGLPX₁X₂T
ASWFTALTQHGKEDLKFPRGQGVPINTX₃SSPDDQIGYYRRATRRIRGGDG
KMKDLSPRWYFYYLGTGPEAGLPYGANKDGIIWVATEGALNTPKDHIGTR
NPANNAAIVLQLPQGTTLPKGFYAEGSRGGSQASSRSSSRSRX₄SSRX₅ST
PGSSRGTSPARMAGNGGDAALALLLLDRLNQLESKMSGKGQQQQGQTVTK
KSAAEASKKPRQKRTATKAYX₆VTQAFGRRGPEQTQGNFGDQELIRQGTD
YKHWPQIAQFAPSASAFFGMSRIGMEVTPSGTWLTYTGAIKLDDKDPNF
KDQVILLNKHIDAYKTFPPTEPKKDKKKKADETQALPQRQKKQQTVTLL
PAADLDDFSKQLQQSMSSADSTQA,

where X is D or N, and 1 of X₁-X₆ is a D.
218. The CEPESC of aspect 217, wherein COV Ag(s) comprise ≥8, ≥12, or ≥20 AAs of SEQ ID NO: 21 and comprise ≥1 of X₁-X₆ and at least one Asp substitution of a corresponding Asn residue in SEQ ID NO: 15.
219. The CEPESC of any one of aspects 209-218, wherein COV Ag(s) comprise SARS-COV2 M protein sequence(s) or FV(s) thereof.
220. The CEPESC of any of aspects 209-219, wherein COV Ag(s) comprise ≥8, ≥12, or ≥20 AAs of SEQ ID NO:16 or a HR or SIFV.
221. The CEPESC of any one of aspects 209-220, wherein COV Ag(s) comprise ≥8, ≥12, or ≥20 AAs of SEQ ID NO: 22 or a HR or SI FV thereof.
222. The CEPESC of any one of aspects 209-221, wherein COV Ag(s) comprise SARS-COV2 E protein sequence(s) or FV(s) thereof.
223. The CEPESC of aspect 122, wherein the cancer Ag(s) PCGCOSCO or CO transitional cell carcinoma Ag(s), bladder cancer Ag(s), or both.
224. The CEPESC of aspect 222, wherein cancer Ag(s) comprise B-RAF Ag(s).
225. The CEPESC of aspect 224, wherein the cancer Ag(s) comprise ≥8, ≥12, or ≥20 AAs of one of SEQ ID NOs: 450-453 or a FV thereof.
226. The CEPESC of any one of aspects 222-225, wherein cancer Ag(s) comprise MAGE-3 Ag(s).
227. The CEPESC of aspect 226, wherein cancer Ag(s) comprise ≥8, ≥12, or ≥20 AAs of SEQ ID NO:454 or a FV thereof.
228. The CEPESC of any one of aspects 222-227, wherein cancer Ag(s) comprise NY-ESO-1 Ag(s).
229. The CEPESC of aspect 228, wherein cancer Ag(s) comprise ≥8, ≥12, or ≥20 AAs of SEQ ID NO:455 or a FV thereof.
230. The CEPESC of any one of aspects 222-229, wherein cancer Ag(s) comprise Her-2 Ag(s).
231. The CEPESC of aspect 230, wherein cancer Ag(s) comprise ≥8, ≥12, or ≥20 AAs of SEQ ID NO:456 or a FV thereof.
232. A CEPESC according to any one of aspects 1-231, wherein the composition is a dried composition that is reconstitute-able and shelf stable for a period of at least one year at room temperature (or ordinary environmental temperatures) and typical humidity conditions.
233. A CEPESC according to any one of aspects 1-121 and 123-222, wherein the CEPESC comprises anti-pathogen composition(s).
234. A CEPESC according to any one of aspects 1-121, 124, and 222-231, wherein the CEPESC comprises anti-cancer composition(s).
235. A CEPESC according to any one of aspects 1-234, wherein the CEPESC comprises adjuvant(s).
236. A CEPESC according to any one of aspects 40-52, wherein the CEPESC induces significantly enhanced IR(s) as compared to a corresponding construct according to the Wistar Art.
237. A method of inducing DOS IR(s) in TR(s) comprising administering EA(s) of CEPESC(s) according to any one of aspects 1-236 to the TR(s).
238. The method of aspect 237, wherein the method comprises delivering EA(s) of composition(s) according to any one of aspects 1-236 to the TR(s) two or more times.
239. A method of inducing DOS IR(s) in TR(s) comprising administering EA(s) of CEPESC(s) according to any one of aspects 122 and 222-231 to TR(s) diagnosed with cancer or a precancerous condition.
240. The method of aspect 239, wherein the method comprises administering a CCC or AAC comprising an anti-cancer compound to the TR.
241. A method of inducing IR(s) against a pathogen comprising delivering EA(s) of CEPESCs of any one of aspects 123-222 to TR(s) to immunize the TR(s) against the pathogens.
242. A method of inducing IR(s) against a pathogen comprising delivering EA(s) of CEPESCs of any one of aspects 123-222 to TR(s) to treat the TR(s) against an infection with the pathogen.
243. The method of aspect 241 or aspect 242, wherein the pathogen is a leaky vaccine associated pathogen.
244. The method of any one of aspects 241-243, wherein the method comprises administering an anti-pathogen CCC or AAC to the TR(s).
245. The method of any one of aspects 237-244243, wherein the TR(s) are non-HVEM-expressing TR(s).
246. The method of any one of aspects 241-245, where TR(s) are NDISTR(s).
247. The method of any of aspects 237-243 & 246, where TR(s) are humans.
248. The method of any one of aspects 237-247, wherein the TR is a companion animal or livestock animal.
249. The method of aspect 248, wherein the TR is a cat, a dog, or a horse.
250. The method of aspect 248, wherein the subject is a bird.
251. The method of aspect 248, wherein the subject is an even toed ungulate.
252. The method of aspect 251, wherein the subject is a pig.
253. The method of any one of aspects 237-252, wherein the method comprises (a) delivering an EA of a first dose of a CEPESC to a TR; monitoring the TR(s) for (i) inducement of CSAE(s) in response to delivery of the 1^{St}composition, (ii) inducement of VAERD in response to delivery of the 1^{St}composition, (iii) inducement of an immunogenic adverse reaction to the 1^{St}composition, (iv) development of immunological tolerance to Ag(s) of the 1^{St}composition, or (v) a combination of any or all of (i)-(iv); and (c) if any of the conditions in (b) is detected (or detected in an amount meeting standard(s)) adjusting the treatment regimen by changing the frequency of CEPESC delivery, dosage of additional CEPESC(s), composition of additional CEPESC(s), or delivery of other compounds or performance of other methods to the TR(s).
254. A method of developing a medicament comprising (a) identifying PCRA(s), (b) delivering the PCRA(s) to IC(s) of TR(s), (c) assessing IR(s) induced by the PCRA(s), (d) selecting CRA(s) that induce IR(s) at or above a standard in the ICs; (e) obtaining NSs encoding the CRA(s); and (f) developing a construct comprising the CRAES(s) and gDPES(s).
255. The method of aspect 254, wherein step (b) comprises administering a construct comprising PCRAES(s) and gDPES(s) to the ICs.
256. The method of aspect 254 or 255, wherein the ICs are in TR(s).
257. The method of any one of aspects 254-256, wherein PCRAES(s) encode variant(s) of a wild-type PCRA from which one or more B cell epitopes have been removed, one or more glycosylation sites have been removed, or both, and the standard comprises a lower likelihood, severity, or duration of a cytokine storm in the test subjects, a reduced likelihood of occurrence, reduced severity, or reduced duration of VAERD in the subjects, or both.
258. The method of any one of aspects 254-257, wherein PCRA(s) comprise predicted MHC I epitope(s) and predicted MHC II epitope(s) and the standard comprises achieving a statistically significant CTL response, a statistically significant TH cell response, and a statistically significant humoral response.
259. The method of any one of aspects 254-258, wherein the method comprises repeatedly administering the same composition administered in step (b) one or more times before evaluating whether the putative antigen is a clinically relevant antigen.
260. A composition comprising (i) one or more nucleic acid molecules that comprise a sequence encoding a fusion protein comprising (a) at least one receptor-binding gD domain, (b) at least one antigenic sequence, and (c) at least two additional antigenic sequences, wherein the at least three antigenic sequences primarily induce immune responses in three different immune cell types, at least one PTPS associated with at least one antigenic sequence, at least one expression-enhancing intron associated with at least one coding sequence, at least one ITII, or a combination of any or all thereof and (ii) means for causing expression of the fusion-protein sequence, and (iii) means for promoting cellular uptake of the nucleic acid molecule(s).
261. The composition of aspect 260, wherein the composition further comprises (iv) means for administering the composition to a subject.
262. A method of promoting, inducing, or enhancing an immune response in an alphaherpesvirus infectable vertebrate animal subject by administering an effective amount of a compound of aspect 260 or aspect 261 to the subject, the method comprising a step for administering the composition to the subject.
263. The method of aspect 262, wherein TR(s) are diagnosed with a cancer and the method comprises employing an additional step for treating cancer.
264. The method of aspect 262, wherein the method is used to treat or prevent a pathogenic infection and the method comprises employing an additional step for pathogenic infection prevention or treatment.

1. A composition comprising an effective amount of one or more nucleic acid molecule(s) comprising nucleotide sequences that encode (a) a fusion protein comprising (i) one or more alphaherpesvirus glycoprotein D (gD) amino acid sequence(s) comprising one or more gD receptor binding domains (RBD(s)), (ii) one or more antigen(s) associated with a disease-causing agent (DCA), and (b) one or more EAT-2 amino acid sequence(s), wherein the gD sequence(s) detectably facilitate dendric cell uptake of the fusion protein.

2. The composition of claim 1, wherein some, most, or all antigen(s) encoded by the nucleotide sequences are associated with one or more polyubiquitin sequences.

3. The composition of claim 2, wherein the glycoprotein D sequence(s) exhibit detectable checkpoint inhibition functions in target recipients.

4. The composition of claim 3, wherein the nucleotide sequences encode one or more non-gD checkpoint modulating amino acid sequence(s).

5. The composition of claim 2, wherein the glycoprotein D sequences do not exhibit checkpoint inhibition in target recipients and the nucleotide sequences encode non-gD checkpoint modulating amino acid sequence(s).

6. The composition of claim 5, wherein the non-gD checkpoint modulating amino acid sequence(s) form a multimeric trap protein that bind a checkpoint inhibitor pathway cell receptor.

7. The composition of claim 2, wherein some, most, or all of the antigen(s) encoded by the nucleotide sequences comprise a glycosylation site removal variation.

8. The composition of claim 2, wherein the nucleic acid molecule(s) are nucleic acid vector(s).

9. The composition of claim 8, wherein the vector(s) are mRNA(s).

10. The composition of claim 8, wherein the vector(s) are plasmids.

11. The composition of claim 10, wherein the plasmids are associated with transfection-facilitating calcium phosphate nanoparticles.

12. The composition of claim 11, wherein the plasmids comprise one or more expression-enhancing introns.

13. The composition of claim 12, wherein the antigen(s) comprise at least one MHCI T cell epitope and at least one MHCII T cell epitope.

14. The composition of claim 13, wherein the nucleotide sequences encode a number of antigens, at least some of which are separated by self-cleavage site(s).

15. The composition of aspect 14, wherein the nucleotide sequences comprise a triclosan selection marker.

16. The composition of claim 12, wherein the antigen(s) comprise cancer antigen(s).

17. The composition of claim 16, wherein the cancer antigen(s) comprise cancer antigen(s) associated with transitional cell carcinoma, bladder cell cancer, or both.

18. The composition of claim 12, wherein the antigen(s) comprise pathogen antigen(s).

19. The composition of claim 18, wherein the pathogen antigen(s) comprise porcine circovirus antigen(s), porcine reproductive and respiratory syndrome virus antigen(s), and/or African swine fever virus antigen(s).

20. A method of protecting or treating pig(s) for a viral infection comprising delivering an effective amount of a composition of claim 19 to the pig(s) one or more time(s) to induce protective or therapeutic immune response(s) against the virus.

The application's sequence listing, which the Patent Office published only in electronic form, follows.

SEQUENCE LISTING (743 sequences)

SEQ ID NO: 1 - protein, 75 aa, Homo sapiens
MQIFVKTLTGKTITLEVEPSDTIENVKAKIQDKEGIPPDQQRLIFAGKQLEDGRTLSDYNIQKESTLHLVLRLRG

SEQ ID NO: 2 - DNA, 6153 bp, Artificial Sequence
  SYNTHETIC CONSTRUCT DERIVED FROM HUMAN THOUGHT
cctgcaggtcgacaatattggctattggccattgcatacgttgtatctatatcataatatgtacatttatattggctcatgtccaatatgaccgccatgttgacattgattattgactagttattaatagtaatcaattacggggtcattagttcatagcccatatatggagttccgcgttacataacttacggtaaatggcccgcctggctgaccgcccaacgacccccgcccattgacgtcaataatgacgtatgttcccatagtaacgccaatagggactttccattgacgtcaatgggtggagtatttacggtaaactgcccacttggcagtacatcaagtgtatcatatgccaagtccgccccctattgacgtcaatgacggtaaatggcccgcctggcattatgcccagtacatgaccttacgggactttcctacttggcagtacatctacgtattagtcatcgctattaccatggtgatgcggttttggcagtacaccaatgggcgtggatagcggtttgactcacggggatttccaagtctccaccccattgacgtcaatgggagtttgttttggcaccaaaatcaacgggactttccaaaatgtcgtaataaccccgccccgttgacgcaaatgggcggtaggcgtgtacggtgggaggtctatataagcagagctcgtttagtgaaccgtcagatcgcctggagacgccatccacgctgttttgacctccatagaagacaccgggaccgatccagcctccgcggccgggaacggtgcattggaacgcggattccccgtgccaagagtgacgtaagtaccgcctatagactctataggcacacccctttggctcttatgcatgctatactgtttttggcttggggcctatacacccccgcttccttatgctataggtgatggtatagcttagcctataggtgtgggttattgaccattattgaccactcccctattggtgacgatactttccattactaatccataacatggctctttgccacaactatctctattggctatatgccaatactctgtccttcagagactgacacggactctgtatttttacaggatggggtcccatttattatttacaaattcacatatacaacaacgccgtcccccgtgcccgcagtttttattaaacatagcgtgggatctccacgcgaatctcgggtacgtgttccggacatgggctcttctccggtagcggcggagcttccacatccgagccctggtcccatgcctccagcggctcatggtcgctcggcagctccttgctcctaacagtggaggccagacttaggcacagcacaatgcccaccaccaccagtgtgccgcacaaggccgtggcggtagggtatgtgtctgaaaatgagctcggagattgggctcgcaccgctgacgcagatggaagacttaaggcagcggcagaagaagatgcaggcagctgagttgttgtattctgataagagtcagaggtaactcccgttgcggtgctgttaacggtggagggcagtgtagtctgagcagtactcgttgctgccgcgcgcgccaccagacataatagctgacagactaacagactgttcctttccatgggtcttttctgcagtcaccgtccaagcttggatccgctagcgccaccatgcagatcttcgtgaagaccctgaccggcaagaccatcaccctggaggtggagcccagtgacaccatcgagaatgtgaaggccaagatccaggataaggagggcattccccccgaccagcagaggctcatctttgcaggcaagcagctggaggatggccgcactctttctgattacaacatccagaaagagtccaccctccatctggttctgcgtctgaggggtgcggccgcagattttattttaaatatatccatgaaaatggaggtcatcttcaaaacggatttaagatcatcttcacaagttgtgtttcatgcgggtagcctgtataattggttttctgttgagattatcaatagcggtagaattgttacgaccgctataaaaacattgcttagtactgttaagtatgatattgtgaaatctgctcgtatatatgcagggcaagggtatactgaacatcaggctcaagaagaatggaatatgattctgcatgtgctgtttgaagaggagacggaatcctcagcatcttcggagaacattcatgaaaaaaatgataatgaaaccaatgaatgcacatcctcctttgaaacgttgtttgagcaagagccctcatcggaggtacctaaagactccaagctgtatatgcttgcacaaaagactgtgcaacatattgaacaatatggaaaggcacctgattttaacaaggttattagagcacataattttattcaaaccatttatggaacccctctaaaggaagaagaaaaagaggtggtaagactcatggttattaaacttttaaaaaaaataagcttttatctcacctacattaccggttccggcgagggcaggggaagtcttctaacatgcggggacgtggaggaaaatcccggcccagtgagcaagggcgaggagctgttcaccggggtggtgcccatcctggtcgagctggacggcgacgtaaacggccacaagttcagcgtgtccggcgagggcgagggcgatgccacctacggcaagctgaccctgaagttcatctgcaccaccggcaagctgcccgtgccctggcccaccctcgtgaccaccctgacctacggcgtgcagtgcttcagccgctaccccgaccacatgaagcagcacgacttcttcaagtccgccatgcccgaaggctacgtccaggagcgcaccatcttcttcaaggacgacggcaactacaagacccgcgccgaggtgaagttcgagggcgacaccctggtgaaccgcatcgagctgaagggcatcgacttcaaggaggacggcaacatcctggggcacaagctggagtacaactacaacagccacaacgtctatatcatggccgacaagcagaagaacggcatcaaggtgaacttcaagatccgccacaacatcgaggacggcagcgtgcagctcgccgaccactaccagcagaacacccccatcggcgacggccccgtgctgctgcccgacaaccactacctgagcacccagtccgccctgagcaaagaccccaacgagaagcgcgatcacatggtcctgctggagttcgtgaccgccgccgggatcactctcggcatggacgagctgtacaagtaactcgaggtttaaacgaattctgcagatatccagcacagtggtcgaggggcccggagatctacgtatgatcagcctcgactgtgccttctagttgccagccatctgttgtttgcccctcccccgtgccttccttgaccctggaaggtgccactcccactgtcctttcctaataaaatgaggaaattgcatcgcattgtctgagtaggtgtcattctattctggggggtggggtggggcaggacagcaagggggaggattgggaagacaatagcaggcatgctggggatgcggtgggctctatggcttctgaggcggaaagaaccagctggggctcgacagctcgactctagaattgcttcctcgctcactgactcgctgcgctcggtcgttcggctgcggcgagcggtatcagctcactcaaaggcggtaatacggttatccacagaatcaggggataacgcaggaaagaacatgtgagcaaaaggccagcaaaaggccaggaaccgtaaaaaggccgcgttgctggcgtttttccataggctccgcccccctgacgagcatcacaaaaatcgacgctcaagtcagaggtggcgaaacccgacaggactataaagataccaggcgtttccccctggaagctccctcgtgcgctctcctgttccgaccctgccgcttaccggatacctgtccgcctttctcccttcgggaagcgtggcgctttctcatagctcacgctgtaggtatctcagttcggtgtaggtcgttcgctccaagctgggctgtgtgcacgaaccccccgttcagcccgaccgctgcgccttatccggtaactatcgtcttgagtccaacccggtaagacacgacttatcgccactggcagcagccactggtaacaggattagcagagcgaggtatgtaggcggtgctacagagttcttgaagtggtggcctaactacggctacactagaagaacagtatttggtatctgcgctctgctgaagccagttaccttcggaaaaagagttggtagctcttgatccggcaaacaaaccaccgctggtagcggtggtttttttgtttgcaagcagcagattacgcgcagaaaaaaaggatctcaagaagatcctttgatcttttctacggggtctgacgctcagtggaacgaaaactcacgttaagggattttggtcatgagattatcaaaaaggatcttcacctagatccttttaaattaaaaatgaagttttaaatcaatctaaagtatatatgagtaaacttggtctgacagttaccaatgcttaatcagtgaggcacctatctcagcgatctgtctatttcgttcatccatagttgcctgactcggggggggggggcgctgaggtctgcctcgtgaagaaggtgttgctgactcataccaggcctgaatcgccccatcatccagccagaaagtgagggagccacggttgatgagagctttgttgtaggtggaccagttggtgattttgaacttttgctttgccacggaacggtctgcgttgtcgggaagatgcgtgatctgatccttcaactcagcaaaagttcgatttattcaacaaagccgccgtcccgtcaagtcagcgtaatgctctgccagtgttacaaccaattaaccaattctgattaattaattatttcagttcgagttcgttcattgcagcaatgctgaaaccgccgtcaacgtggaccacttcaccggagataccggcagagagatcggagcacaggaatgccgcagagttacccacatcttcaatagtaacggtacggcgaatcggggtaacggcttcgcaatgagccagcattttgcggaagtctttgataccggaggccgccagagtacggatcggaccagcagagatggcgttaacacgcacaccttccggacccatcgcgttcgccatatagcgcacgttcgcttccagagacgcttttgccagacccataacgttgtagttcgggatagcgcgctcagcgccaaggtaggaaagggtcagcagggcagaacccggattcagcatggagcggcaagcttttgccattgcaacgaagctgtaggagctgatgtcgtgggcaattttgaagccttcacgggtaacggcgttaacatagtcaccatccagctgatcgccaggtgcaaaaccaatagagtgtacgaaaccgtcaaatttcggccaaactttccccagttcagcgaacatggtgtcgatgctggcatcttctgcaacatcgcactgcagaacgatgtcagaacccaattgagcggcaaattcttctacgcggcctttcagtttgtcgttctggtaggtgaatgccagttcagctccttcgcggtgcatcgcctgagcgataccgtaggcgatggatagtttgctggcaacgccggttaccagaatgcgcttaccggaaagaaaacccatagctttaatccttattgttgatgcttgttgtgcctgaaaatcaggcgattcgtcgttttagtaaacagtacgaacagataaacggttattataatcaacctggctgtgagtagctatagttgccaggtccgaccggagcaggctgcggcagggggggcgcttttcccctcaccctaaccctctccccagaggggcgaggggaccgtattgtgcaaatattgttaccccagcaacaaacaggctcatacagcccctaaccctttcatggcgatggctgggacggttcagaccttgccgaatattctccagcacaatattattgaagcatttatcagggttattgtcggcgcgcctcagagattttgagacacaacgtggctttccccccccccccggcatg

SEQ ID NO: 3 - DNA, 6223 bp, Artificial Sequence
  SYNTHETIC CONSTRUCT DERIVED FROM HUMAN THOUGHT
cctgcaggtcgacattgattattgactagttattaatagtaatcaattacggggtcattagttcatagcccatatatggagttccgcgttacataacttacggtaaatggcccgcctggctgaccgcccaacgacccccgcccattgacgtcaataatgacgtatgttcccatagtaacgccaatagggactttccattgacgtcaatgggtggactatttacggtaaactgcccacttggcagtacatcaagtgtatcatatgccaagtacgccccctattgacgtcaatgacggtaaatggcccgcctggcattatgcccagtacatgaccttatgggactttcctacttggcagtacatctacgtattagtcatcgctattaccatgggtcgaggtgagccccacgttctgcttcactctccccatctcccccccctccccacccccaattttgtatttatttattttttaattattttgtgcagcgatgggggcggggggggggggggcgcgcgccaggcggggcggggcggggcgaggggcggggcggggcgaggcggagaggtgcggcggcagccaatcagagcggcgcgctccgaaagtttccttttatggcgaggcggcggcggcggcggccctataaaaagcgaagcgcgcggcgggcgggagtcgctgcgttgccttcgccccgtgccccgctccgcgccgcctcgcgccgcccgccccggctctgactgaccgcgttactcccacaggtgagcgggcgggacggcccttctcctccgggctgtaattagcgcttggtttaatgacggctcgtttcttttctgtggctgcgtgaaagccttaaagggctccgggagggccctttgtgcgggggggagcggctcggggggtgcgtgcgtgtgtgtgtgcgtggggagcgccgcgtgcggcccgcgctgcccggcggctgtgagcgctgcgggcgcggcgcggggctttgtgcgctccgcgtgtgcgcgaggggagcgcggccgggggcggtgccccgcggtgcgggggggctgcgaggggaacaaaggctgcgtgcggggtgtgtgcgtgggggggtgagcagggggtgtgggcgcggcggtcgggctgtaacccccccctgcacccccctccccgagttgctgagcacggcccggcttcgggtgcggggctccgtgcggggcgtggcgcggggctcgccgtgccgggcggggggtggcggcaggtgggggtgccgggcggggcggggccgcctcgggccggggagggctcgggggaggggcgcggcggccccggagcgccggcggctgtcgaggcgcggcgagccgcagccattgccttttatggtaatcgtgcgagagggcgcagggacttcctttgtcccaaatctggcggagccgaaatctgggaggcgccgccgcaccccctctagcgggcgcgggcgaagcggtgcggcgccggcaggaaggaaatgggcggggagggccttcgtgcgtcgccgcgccgccgtccccttctccatctccagcctcggggctgccgcagggggacggctgccttcgggggggacggggcagggcggggttcggcttctggcgtgtgaccggcggctctagagcctctgctaaccatgttcatgccttcttctttttcctacagctcctgggcaacgtgctggttattgtgctgtctcatcattttggcaaaaagcttggatccgctagcgccaccatgcagatcttcgtgaagaccctgaccggcaagaccatcaccctggaggtggagcccagtgacaccatcgagaatgtgaaggccaagatccaggataaggagggcattccccccgaccagcagaggctcatctttgcaggcaagcagctggaggatggccgcactctttctgattacaacatccagaaagagtccaccctccatctggttctgcgtctgaggggtgcggccgcagattttattttaaatatatccatgaaaatggaggtcatcttcaaaacggatttaagatcatcttcacaagttgtgtttcatgcgggtagcctgtataattggttttctgttgagattatcaatagcggtagaattgttacgaccgctataaaaacattgcttagtactgttaagtatgatattgtgaaatctgctcgtatatatgcagggcaagggtatactgaacatcaggctcaagaagaatggaatatgattctgcatgtgctgtttgaagaggagacggaatcctcagcatcttcggagaacattcatgaaaaaaatgataatgaaaccaatgaatgcacatcctcctttgaaacgttgtttgagcaagagccctcatcggaggtacctaaagactccaagctgtatatgcttgcacaaaagactgtgcaacatattgaacaatatggaaaggcacctgattttaacaaggttattagagcacataattttattcaaaccatttatggaacccctctaaaggaagaagaaaaagaggtggtaagactcatggttattaaacttttaaaaaaaataagcttttatctcacctacattaccggttccggcgagggcaggggaagtcttctaacatgcggggacgtggaggaaaatcccggcccagtgagcaagggcgaggagctgttcaccggggtggtgcccatcctggtcgagctggacggcgacgtaaacggccacaagttcagcgtgtccggcgagggcgagggcgatgccacctacggcaagctgaccctgaagttcatctgcaccaccggcaagctgcccgtgccctggcccaccctcgtgaccaccctgacctacggcgtgcagtgcttcagccgctaccccgaccacatgaagcagcacgacttcttcaagtccgccatgcccgaaggctacgtccaggagcgcaccatcttcttcaaggacgacggcaactacaagacccgcgccgaggtgaagttcgagggcgacaccctggtgaaccgcatcgagctgaagggcatcgacttcaaggaggacggcaacatcctggggcacaagctggagtacaactacaacagccacaacgtctatatcatggccgacaagcagaagaacggcatcaaggtgaacttcaagatccgccacaacatcgaggacggcagcgtgcagctcgccgaccactaccagcagaacacccccatcggcgacggccccgtgctgctgcccgacaaccactacctgagcacccagtccgccctgagcaaagaccccaacgagaagcgcgatcacatggtcctgctggagttcgtgaccgccgccgggatcactctcggcatggacgagctgtacaagtaactcgaggtttaaacgaattctgcagatatccagcacagtggtcgaggggcccggagatctacgtatgatcagcctcgactgtgccttctagttgccagccatctgttgtttgcccctcccccgtgccttccttgaccctggaaggtgccactcccactgtcctttcctaataaaatgaggaaattgcatcgcattgtctgagtaggtgtcattctattctggggggtggggtggggcaggacagcaagggggaggattgggaagacaatagcaggcatgctggggatgcggtgggctctatggcttctgaggcggaaagaaccagctggggctcgacagctcgactctagaattgcttcctcgctcactgactcgctgcgctcggtcgttcggctgcggcgagcggtatcagctcactcaaaggcggtaatacggttatccacagaatcaggggataacgcaggaaagaacatgtgagcaaaaggccagcaaaaggccaggaaccgtaaaaaggccgcgttgctggcgtttttccataggctccgcccccctgacgagcatcacaaaaatcgacgctcaagtcagaggtggcgaaacccgacaggactataaagataccaggcgtttccccctggaagctccctcgtgcgctctcctgttccgaccctgccgcttaccggatacctgtccgcctttctcccttcgggaagcgtggcgctttctcatagctcacgctgtaggtatctcagttcggtgtaggtcgttcgctccaagctgggctgtgtgcacgaaccccccgttcagcccgaccgctgcgccttatccggtaactatcgtcttgagtccaacccggtaagacacgacttatcgccactggcagcagccactggtaacaggattagcagagcgaggtatgtaggcggtgctacagagttcttgaagtggtggcctaactacggctacactagaagaacagtatttggtatctgcgctctgctgaagccagttaccttcggaaaaagagttggtagctcttgatccggcaaacaaaccaccgctggtagcggtggtttttttgtttgcaagcagcagattacgcgcagaaaaaaaggatctcaagaagatcctttgatcttttctacggggtctgacgctcagtggaacgaaaactcacgttaagggattttggtcatgagattatcaaaaaggatcttcacctagatccttttaaattaaaaatgaagttttaaatcaatctaaagtatatatgagtaaacttggtctgacagttaccaatgcttaatcagtgaggcacctatctcagcgatctgtctatttcgttcatccatagttgcctgactcggggggggggggcgctgaggtctgcctcgtgaagaaggtgttgctgactcataccaggcctgaatcgccccatcatccagccagaaagtgagggagccacggttgatgagagctttgttgtaggtggaccagttggtgattttgaacttttgctttgccacggaacggtctgcgttgtcgggaagatgcgtgatctgatccttcaactcagcaaaagttcgatttattcaacaaagccgccgtcccgtcaagtcagcgtaatgctctgccagtgttacaaccaattaaccaattctgattaattaattatttcagttcgagttcgttcattgcagcaatgctgaaaccgccgtcaacgtggaccacttcaccggagataccggcagagagatcggagcacaggaatgccgcagagttacccacatcttcaatagtaacggtacggcgaatcggggtaacggcttcgcaatgagccagcattttgcggaagtctttgataccggaggccgccagagtacggatcggaccagcagagatggcgttaacacgcacaccttccggacccatcgcgttcgccatatagcgcacgttcgcttccagagacgcttttgccagacccataacgttgtagttcgggatagcgcgctcagcgccaaggtaggaaagggtcagcagggcagaacccggattcagcatggagcggcaagcttttgccattgcaacgaagctgtaggagctgatgtcgtgggcaattttgaagccttcacgggtaacggcgttaacatagtcaccatccagctgatcgccaggtgcaaaaccaatagagtgtacgaaaccgtcaaatttcggccaaactttccccagttcagcgaacatggtgtcgatgctggcatcttctgcaacatcgcactgcagaacgatgtcagaacccaattgagcggcaaattcttctacgcggcctttcagtttgtcgttctggtaggtgaatgccagttcagctccttcgcggtgcatcgcctgagcgataccgtaggcgatggatagtttgctggcaacgccggttaccagaatgcgcttaccggaaagaaaacccatagctttaatccttattgttgatgcttgttgtgcctgaaaatcaggcgattcgtcgttttagtaaacagtacgaacagataaacggttattataatcaacctggctgtgagtagctatagttgccaggtccgaccggagcaggctgcggcagggggggcgcttttcccctcaccctaaccctctccccagaggggcgaggggaccgtattgtgcaaatattgttaccccagcaacaaacaggctcatacagcccctaaccctttcatggcgatggctgggacggttcagaccttgccgaatattctccagcacaatattattgaagcatttatcagggttattgtcggcgcgcctcagagattttgagacacaacgtggctttccccccccccccggcatg

SEQ ID NO: 4 - protein, 287 aa, Sus scrofa
MRICSIFTFMAYCCLLEAFTITVPKDMYEVEYGSNVTLECRFPVDKQLNLLALVVYWEMKDKKIIQFVNGEEDLNVQHSSYSQRAQLLKDQLFLGKASLQITDVKLQDAGVYCCLISYGGADYKRITLKVNAPYRKINQRMSLDPVTSEHELTCQAEGYPEAEVIWTSSDYQILSGKTTITSSQREEKLFNVTSTLRVNATTNEIFYCTFRRLGPEENSTAVLVIPEPYVDPARKRTHWVILGALLLLIAVTAIFCLKRNVRMMDVEKCGSRDMKSEKQNDTQFEET

SEQ ID NO: 5 - DNA, 513 bp, cytomegalovirus (CMV) (virus)
acttacggtaaatggcccgcctggctgaccgcccaacgacccccgcccattgacgtcaataatgacgtatgttcccatagtaacgccaatagggactttccattgacgtcaatgggtggagtatttacggtaaactgcccacttggcagtacatcaagtgtatcatatgccaagtccgccccctattgacgtcaatgacggtaaatggcccgcctggcattatgcccagtacatgaccttacgggactttcctacttggcagtacatctacgtattagtcatcgctattaccatggtgatgcggttttggcagtacaccaatgggcgtggatagcggtttgactcacggggatttccaagtctccaccccattgacgtcaatgggagtttgttttggcaccaaaatcaacgggactttccaaaatgtcgtaataaccccgccccgttgacgcaaatgggcggtaggcgtgtacggtgggaggtctatataagcagagctcgtttagtgaaccg

SEQ ID NO: 6 - DNA, 204 bp, cytomegalovirus (CMV) (virus)
gtgatgcggttttggcagtacaccaatgggcgtggatagcggtttgactcacggggatttccaagtctccaccccattgacgtcaatgggagtttgttttggcaccaaaatcaacgggactttccaaaatgtcgtaataaccccgccccgttgacgcaaatgggcggtaggcgtgtacggtgggaggtctatataagcagagct

SEQ ID NO: 7 - DNA, 304 bp, cytomegalovirus (CMV) (virus)
gcgttacataacttacggtaaatggcccgcctcgtgaccgcccaacgacccccgcccattgacgtcaataatgacgtatgttcccatagtaacgccaatagggactttccattgacgtcaatgggtggagtatttacggtaaactgcccacttggcagtacatcaagtgtatcatatgccaagtccggccccctattgacgtcaatgacggtaaatggcccgcctggcattatgcccagtacatgaccttacgggactttcctacttggcagtacatctacgtattagtcatcgctattaccat

SEQ ID NO: 8 - DNA, 825 bp, cytomegalovirus (CMV) (virus)
cgtaagtaccgcctatagactctataggcacacccctttggctcttatgcatgctatactgtttttggcttggggcctatacacccccgctccttatgctataggtgatggtatagcttagcctataggtgtgggttattgaccattattgaccactcccctattggtgacgatactttccattactaatccataacatggctctttgccacaactatctctattggctatatgccaatactctgtccttcagagactgacacggactctgtatttttacaggatggggtcccatttattatttacaaattcacatatacaacaacgccgtcccccgtgcccgcagtttttattaaacatagcgtgggatctccacgcgaatctcgggtacgtgttccggacatgggctcttctccggtagcggcggagcttccacatccgagccctggtcccatgcctccagcggctcatggtcgctcggcagctccttgctcctaacagtggaggccagacttaggcacagcacaatgcccaccaccaccagtgtgccgcacaaggccgtggcggtagggtatgtgtctgaaaatgagctcggagattgggctcgcaccgtgacgcagatggaagacttaaggcagcggcagaagaagatgcaggcagctgagttgttgtattctgataagagtcagaggtaactcccgttgcggtgctgttaacggtggagggcagtgtagtctgagcagtactcgttgctgccgcgcgcgccaccagacataatagctgacagactaacagactgttcctttccatgggtcttttctgcag

SEQ ID NO: 9 - DNA, 956 bp, cytomegalovirus (CMV) (virus)
tcagatcgcctggagacgccatccacgctgttttgacctccatagaagacaccgggaccgatccagcctccgcggccgggaacggtgcattggaacgcggattccccgtgccaagagtgacgtaagtaccgcctatagactctataggcacacccctttggctcttatgcatgctatactgtttttggcttggggcctatacacccccgcttccttatgctataggtgatggtatagcttagcctataggtgtgggttattgaccattattgaccactcccctattggtgacgatactttccattactaatccataacatggctctttgccacaactatctctattggctatatgccaatactctgtccttcagagactgacacggactctgtatttttacaggatggggtcccatttattatttacaaattcacatatacaacaacgccgtcccccgtgcccgcagtttttattaaacatagcgtgggatctccacgcgaatctcgggtacgtgttccggacatgggctcttctccggtagcggcggagcttccacatccgagccctggtcccatgcctccagcggctcatggtcgctcggcagctccttgctcctaacagtggaggccagacttaggcacagcacaatgcccaccaccaccagtgtgccgcacaaggccgtggcggtagggtatgtgtctgaaaatgagctcggagattgggctcgcaccgctgacgcagatggaagacttaaggcagcggcagaagaagatgcaggcagctgagttgttgtattctgataagagtcagaggtaactcccgttgcggtgctgttaacggtggagggcagtgtagtctgagcagtactcgttgctgccgcgcgcgccaccagacataatagctgacagactaacagactgttcctttccatgggtcttttctgcagtcaccgtcc

SEQ ID NO: 10 - DNA, 215 bp, Artificial Sequence
  SYNTHETIC CONSTRUCT DERIVED FROM HUMAN THOUGHT
gcctcgactgtgccttctagttgccagccatctgttgtttgcccctcccccgtgccttccttgaccctggaaggtgccactcccactgtcctttcctaataaaatgaggaaattgcatcgcattgtctgagtaggtgtcattctattctggggggtggggtggggcaggacagcaagggggaggattgggaagacaatagcaggcatgctgggga

SEQ ID NO: 11 - protein, 254 aa, Porcine reproductive and respiratory syndrome virus
MVNSCTFLHIFLCCSFLYSFCCAVVAGSNTTYCFWFPLVRGNFSFELTVNYTVCPPCLTRQAATEIYEPGRSLWCRIGYDRCGEDDHDELGFMIPPGLSSEGHLTSVYAWLAFLSFSYTAQFHPEIFGIGNVSRVYVDIKHQLICAEHDGQNTTLPRHDNISAVFQTYYQHQVDGGNWFHLEWLRPFFSSWLVLNVSWFLRRSPANHVSVRVLQILRPTPPQRQALLSSKTSVALGIATRPLRRFAKSLSAVRR

SEQ ID NO: 12 - protein, 254 aa, Artificial Sequence
  SYNTHETIC CONSTRUCT DERIVED FROM HUMAN THOUGHT
MVNSCTFLHIFLCCSFLYSFCCAVVAGSDTTYCFWFPLVRGDFSFELTVDYTVCPPCLTRQAATEIYEPGRSLWCRIGYDRCGEDDHDELGFMIPPGLSSEGHLTSVYAWLAFLSFSYTAQFHPEIFGIGDVSRVYVDIKHQLICAEHDGQDTTLPRHDDISAVFQTYYQHQVDGGNWFHLEWLRPFFSSWLVLDVSWFLRRSPANHVSVRVLQILRPTPPQRQALLSSKTSVALGIATRPLRRFAKSLSAVRR

SEQ ID NO: 13 - protein, 100 aa, Artificial Sequence
  SYNTHETIC CONSTRUCT DERIVED FROM HUMAN THOUGHT
MVNSCTFLHIFLCCSFLYSFCCAVVAGSDTTYCFWFPLVRGDFSFELTVDYTVCPPCLTRQAATEIYEPGRSLWCRIGYDRCGEDDHDELGFMIPPGLSS

SEQ ID NO: 14 - protein, 1273 aa, severe acute respiratory syndrom coronavirus 2 (SARS-CoV-2) (virus)
MFVFLVLLPLVSSQCVNLTTRTQLPPAYTNSFTRGVYYPDKVFRSSVLHSTQDLFLPFFSNVTWFHAIHVSGTNGTKRFDNPVLPFNDGVYFASTEKSNIIRGWIFGTTLDSKTQSLLIVNNATNVVIKVCEFQFCNDPFLGVYYHKNNKSWMESEFRVYSSANNCTFEYVSQPFLMDLEGKQGNFKNLREFVFKNIDGYFKIYSKHTPINLVRDLPQGFSALEPLVDLPIGINITRFQTLLALHRSYLTPGDSSSGWTAGAAAYYVGYLQPRTFLLKYNENGTITDAVDCALDPLSETKCTLKSFTVEKGIYQTSNFRVQPTESIVRFPNITNLCPFGEVFNATRFASVYAWNRKRISNCVADYSVLYNSASFSTFKCYGVSPTKLNDLCFTNVYADSFVIRGDEVRQIAPGQTGKIADYNYKLPDDFTGCVIAWNSNNLDSKVGGNYNYLYRLFRKSNLKPFERDISTEIYQAGSTPCNGVEGFNCYFPLQSYGFQPTNGVGYQPYRVVVLSFELLHAPATVCGPKKSTNLVKNKCVNFNFNGLTGTGVLTESNKKFLPFQQFGRDIADTTDAVRDPQTLEILDITPCSFGGVSVITPGTNTSNQVAVLYQDVNCTEVPVAIHADQLTPTWRVYSTGSNVFQTRAGCLIGAEHVNNSYECDIPIGAGICASYQTQTNSPRRARSVASQSIIAYTMSLGAENSVAYSNNSIAIPTNFTISVTTEILPVSMTKTSVDCTMYICGDSTECSNLLLQYGSFCTQLNRALTGIAVEQDKNTQEVFAQVKQIYKTPPIKDFGGFNFSQILPDPSKPSKRSFIEDLLFNKVTLADAGFIKQYGDCLGDIAARDLICAQKFNGLTVLPPLLTDEMIAQYTSALLAGTITSGWTFGAGAALQIPFAMQMAYRFNGIGVTQNVLYENQKLIANQFNSAIGKIQDSLSSTASALGKLQDVVNQNAQALNTLVKQLSSNFGAISSVLNDILSRLDKVEAEVQIDRLITGRLQSLQTYVTQQLIRAAEIRASANLAATKMSECVLGQSKRVDFCGKGYHLMSFPQSAPHGVVFLHVTYVPAQEKNFTTAPAICHDGKAHFPREGVFVSNGTHWFVTQRNFYEPQIITTDNTFVSGNCDVVIGIVNNTVYDPLQPELDSFKEELDKYFKNHTSPDVDLGDISGINASVVNIQKEIDRLNEVAKNLNESLIDLQELGKYEQYIKWPWYIWLGFIAGLIAIVMVTIMLCCMTSCCSCLKGCCSCGSCCKFDEDDSEPVLKGVKLHYT

SEQ ID NO: 15 - protein, 419 aa, severe acute respiratory syndrom coronavirus 2 (SARS-CoV-2) (virus)
MSDNGPQNQRNAPRITFGGPSDSTGSNQNGERSGARSKQRRPQGLPNNTASWFTALTQHGKEDLKFPRGQGVPINTNSSPDDQIGYYRRATRRIRGGDGKMKDLSPRWYFYYLGTGPEAGLPYGANKDGIIWVATEGALNTPKDHIGTRNPANNAAIVLQLPQGTTLPKGFYAEGSRGGSQASSRSSSRSRNSSRNSTPGSSRGTSPARMAGNGGDAALALLLLDRLNQLESKMSGKGQQQQGQTVTKKSAAEASKKPRQKRTATKAYNVTQAFGRRGPEQTQGNFGDQELIRQGTDYKHWPQIAQFAPSASAFFGMSRIGMEVTPSGTWLTYTGAIKLDDKDPNFKDQVILLNKHIDAYKTFPPTEPKKDKKKKADETQALPQRQKKQQTVTLLPAADLDDFSKQLQQSMSSADSTQA

SEQ ID NO: 16 - protein, 222 aa, severe acute respiratory syndrom coronavirus 2 (SARS-CoV-2) (virus)
MADSNGTITVEELKKLLEQWNLVIGFLFLTWICLLQFAYANRNRFLYIIKLIFLWLLWPVTLACFVLAAVYRINWITGGIAIAMACLVGLMWLSYFIASFRLFARTRSMWSFNPETNILLNVPLHGTILTRPLLESELVIGAVILRGHLRIAGHHLGRCDIKDLPKEITVATSRTLSYYKLGASQRVAGDSGFAAYSRYRIGNYKLNTDHSSSSDNIALLVQ

SEQ ID NO: 17 - protein, 132 aa, Homo sapiens
MDLPYYHGRLTKQDCETLLLKEGVDGNFLLRDSESIPGVLCLCVSFKNIVYTYRIFREKHGYYRIQTAEGSPKQVFPSLKELISKFEKPNQGMVVHLLKPIKRTSPSLRWRGLKLELETFVNSNSDYVDVLP

SEQ ID NO: 18 - DNA, 3977 bp, Mus musculus
agaatctaattatggttacctacatgagcactagtgggcggttattagagcatctgctatttgttggtggtaacaacatcaaagaccacgacactccttcccccagaaaccgttaactgccaatagtcccttggggaggggagggctccatgagcctcactcctacccatgatgaaatgttgaaggcccaagcctggcagagcttctgcagcaaaccatgaaatgtgtcatgatgggaagatgtcatttcacagcacacctccttgtctcctagctcctacattctttccaccccttcttccacagtgtttcctgagccctgatacagacgccttgcttaaagctgagtactccatcactgattctccggactttgaccagctgaggacaagagagctaagactaccagagtgctttctgttcatctttactgactgacgacctgaaaacgctatggctcgtttctcaacgtacatcatctttacctctgtcctctgtcagctaacagtcacagcagcttctggaactctgaagaaggtggccggtgcccttgatggatctgtgacattcactctgaatatcactgaaataaaggttgactatgttgtatggacgttcaacacattctttcttgccatggtaaaaaaagacggcgttacatcacaaagtagtaacaaagaaaggatagtctttccagatggactctactccatgaagctcagccaattgaagaagaatgactctggagcctaccgtgcagagatttacagtacatcgagtcaggcttccttaatccaggagtatgtgctgcatgtctacaagcatttgtcaaggcccaaggtcaccatagatcggcaaagcaacaagaatggcacctgcgtaatcaatctgacatgttccacggatcaggacggggagaatgtaacctacagctggaaagctgtggggcagggggacaatcagtttcatgatggtgccaccctctccatcgcctggagatcaggagagaaagaccaggccttaacatgcatggccaggaatccagtcagcaacagtttctcaacccccgtctttccccagaagctctgtgaagatgctgccacggatctaacttcactcaggggcatcctatacatcctgtgcttctcagcagtgctcatcctatttgctgtcttgctgactatttttcatactatgtggataaagaaaggaaaaggatgtgaggaagacaagaagagagtggacaggcaccaggaaatgcccgacttgtgccctcacttagaggagaacgcagactatgacacaatcccttacacggaaaaaagaagaccagaagaagatgcaccaaacacattttattccactgtgcagatccccaaagtggtaaagagtcccagctccctgcctgcaaagccactcgtgccaaggtcattaagctttgaaaatgttatctagatgacagcactccgtcctctccagaaaaaaacaaaacaaaacaaaactgcaaaacaaacaaaacctcaccattctgagcagaaatgaaaacttctgtcaaagactgaatgtaaatgtctccccgccagacccacatgtttgcatccagacagagaagttcaggctcaagggctttcagggtacaatgactcttggggactgggatacagcccattcagacattctgactaagaatctctctatgcccatcctgtctccggtaatgatgaatgaggctgtgctcatagacagtggactaatttgtctgatgaagaaatttttgacaaagcacagcatttggctgtggcacagccatgttcgctgtttttattcacatttatagctgtatgtaaataatctcaatcattcagttcccagataaaagacacataaccttttatatttattataagcctttatagactagagctgggcagatatctaccctctaagctatttttgcctacttccctatcaataaccccaagatataatttgccatgttccatctaggctgctcttactccaattggcccagcccttatggccatattttcatgattccccaacacaatggtgtcttctctctccaccgtctctcctcatgaacctcctgcctcagatcccaagcctgggaaccaaaacctcacctccctctcttctgccctgctataggctgccgacatctttattcacccagtagttttaaattaaggagcagggaaacatggtatcactttgtgtaggtgaggattctctagtcccagagggcaaccagaccttggggaccagtgacaagtattacaatacatagcaacagaccaaacctcagcagaactcaaaacaaagaaaaggaacaggaagatgggaaaagcatgcaggttgatagacagcatgaagggttttcaaatgggtttttcagcttcgactgtaatggttaaagggatgagcccagactgtgccctaggacaagagaaaggggacactgagagctaaaccctgtctttcaaaaaccctattcaaaaaagctttcatttaaaagaaagaatgcctgaacacagagtgtcccacatcgcacatcagactgtggaagtgtttctctgggttctcacggttctcagaggctgctggagccctgacccaagcaggtatggctccatcctggagtgacagcagaactcagcaatgtccacacgtgcagaatgtaaactctggggagccactgaagcttgcactaaggttccaggggaggaaaaccaggcaacgtgtatcgaggttgggctttctgaatggacctgccttgtaagcctgcataaaactatgaaggcaaagcctaacttgcagtttagactccaggatgctggagctgcctaaaacataaaggatgctggagctgcccagaacataaagcatctactaagaaaattttcaggcactgaaaacacccgagaaagaggccacgtgtggttttggttggaaggtcatggaaacaggcctcctcaaacccattggaacatacatgatgataccatgtacccaagatgccagatacggagcttcaaggcttatacctctctgctgagttttctcctatctttggctctttctttgccacgccccatccctcccttttggaatgtgaatgtttcctctgccattgtgcattgaaagtatgtgagttttctattttttaagagctcacaactaggactttgccttacatctcataaaagacattggacattgaactgttatggctagggactcttgaagttagatggaatgtgttttgcattgtgtgatgaccgtaggcatattgagccaagacctgtgagccaagacgggagtgttatggattgagtcgaaaagattcaaggttgcgggcttgtgtggttcaacacttggtgttatttaagggtgctgtagaccctatagaagatagagtctgtctgcagacggtgagtctccaggaggcaggcctagaaagtgacagtcactcctggctctgggcaagccttctgctccacctcaggcagaatcctgtccaccatgttatgaagaagcagacattgcaaactccctccaacacaggccaagcccctaaagccgccatgcctctgatgacaatggattataacctctagaactcaaaatcgaaagcaggcccttcccctgtaagttgctcctgccaggattttggcagtgtggtagctgataccacttccttccagaataagctattctcagcctctttggactctgaggttcatcgtccaattgctgagaactctcctcaaacccagaatctgtattcctttctgccagtgtgactgaatctgtcagttagcccagagaaaatgactgggagatgcctgaaattgctccaaataagtctattaatttattaatggaaccagcagctatgagccaggtgctgtgttacactttcatggattgttgcaatacactcactcttgcttgat

SEQ ID NO: 19 - protein, 132 aa, Mus musculus
MDLPYYHGCLTKRECEALLLKGGVDGNFLIRDSESVPGALCLCVSFKKLVYSYRIFREKHGYYRIETNAHTPRTIFPNLQELVSKYGKPGQGLVVHLSNPIMRNNLCQRGRRMELELNVYENTDKEYVDVLP

SEQ ID NO: 20 - protein, 1272 aa, Artificial Sequence
  SYNTHETIC CONSTRUCT DERIVED FROM HUMAN THOUGHT
  MISC_FEATURE (1)..(1272): WHEREIN EACH X (Xaa) IS N OR D (Asx)
MFVFLVLLPLVSSQCVXLTTRTQLPPAYTNSFTRGVYYPDKVFRSSVLHSTQDLFLPFFSXVTWFHAIHSGTXGTKRFDNPVLPFNDGVYFASTEKSNIIRGWIFGTTLDSKTQSLLIVNXATNVVIKVCEFQFCNDPFLGVYYHKNXKSWMESEFRVYSSANXCTFEYVSQPFLMDLEGKQGNFKNLREFVFKNIDGYFKIYSKHTPINLVRDLPQGFSALEPLVDLPIGIXITRFQTLLALHRSYLTPGDSSSGWTAGAAAYYVGYLQPRTFLLKYNEXGTITDAVDCALDPLSETKCTLKSFTVEKGIYQTSNFRVQPTESIVRFPXITNLCPFGEVFXATRFASVYAWNRKRISNCVADYSVLYNSASFSTFKCYGVSPTKLNDLCFTNVYADSFVIRGDEVRQIAPGQTGKIADYNYKLPDDFTGCVIAWNSNNLDSKVGGNYNYLYRLFRKSNLKPFERDISTEIYQAGSTPCNGVEGFNCYFPLQSYGFQPTNGVGYQPYRVVVLSFELLHAPATVCGPKKSTNLVKNKCVNFNFNGLTGTGVLTESNKKFLPFQQFGRDIADTTDAVRDPQTLEILDITPCSFGGVSVITPGTXTSNQVAVLYQDVXCTEVPVAIHADQLTPTWRVYSTGSNVFQTRAGCLIGAEHVXNSYECDIPIGAGICASYQTQTNSPRRARSVASQSIIAYTMSLGAENSVAYSXNSIAIPTXFTISVTTEILPVSMTKTSVDCTMYICGDSTECSNLLLQYGSFCTQLNRALTGIAVEQDKNTQEVFAQVKQIYKTPPIKDFGGFXFSQILPDPSKPSKRSFIEDLLFNKVTLADAGFIKQYGDCLGDIAARDLICAQKFNGLTVLPPLLTDEMIAQYTSALLAGTITSGWTFGAGAALQIPFAMQMAYRFNGIGVTQNVLYENQKLIANQFNSAIGKIQDSLSSTASALGKLQDVVNQNAQALNTLVKQLSSNFGAISSVLNDILSRLDKVEAEVQIDRLITGRLQSLQTYVTQQLIRAAEIRASANLAATKMSECVLGQSKRVDFCGKGYHLMSFPQSAPHGVVFLHVTYVPAQEKXFTTAPAICHDGKAHFPREGVFVSXGTHWFVTQRNFYEPQIITTDNTFVSGNCDVVIGIVXXTVYDPLQPELDSFKEELDKYFKXHTSPDVDLGDISGIXASVVNIQKEIDRLNEVAKNLXESLIDLQELGKYEQYIKWPWYIWLGFIAGLIAIVMVTIMLCCMTSCCSCLKGCCSCGSCCKFDEDDSEPVLKGVKLHYT

SEQ ID NO: 21 - protein, 419 aa, Artificial Sequence
  SYNTHETIC CONSTRUCT DERIVED FROM HUMAN THOUGHT
  MISC_FEATURE (1)..(419): WHEREIN EACH X (Xaa) IS N OR D (Asx)
MSDNGPQNQRNAPRITFGGPSDSTGSNQNGERSGARSKQRRPQGLPXXTASWFTALTQHGKEDLKFPRGQGVPINTXSSPDDQIGYYRRATRRIRGGDGKMKDLSPRWYFYYLGTGPEAGLPYGANKDGIIWVATEGALNTPKDHIGTRNPANNAAIVLQLPQGTTLPKGFYAEGSRGGSQASSRSSSRSRXSSRXSTPGSSRGTSPARMAGNGGDAALALLLLDRLNQLESKMSGKGQQQQGQTVTKKSAAEASKKPRQKRTATKAYXVTQAFGRRGPEQTQGNFGDQELIRQGTDYKHWPQIAQFAPSASAFFGMSRIGMEVTPSGTWLTYTGAIKLDDKDPNFKDQVILLNKHIDAYKTFPPTEPKKDKKKKADETQALPQRQKKQQTVTLLPAADLDDFSKQLQQSMSSADSTQA

SEQ ID NO: 22 - protein, 222 aa, Artificial Sequence
  SYNTHETIC CONSTRUCT DERIVED FROM HUMAN THOUGHT
MADSDGTITVEELKKLLEQWNLVIGFLFLTWICLLQFAYANRNRFLYIIKLIFLWLLWPVTLACFVLAAVYRINWITGGIAIAMACLVGLMWLSYFIASFRLFARTRSMWSFNPETNILLNVPLHGTILTRPLLESELVIGAVILRGHLRIAGHHLGRCDIKDLPKEITVATSRTLSYYKLGASQRVAGDSGFAAYSRYRIGNYKLNTDHSSSSDNIALLVQ

SEQ ID NO: 23 - protein, 203 aa, African swine fever virus
AAADFILNISMKMEVIFKTDLRSSSQVVFHAGSLYNWFSVEIINSGRIVTTAIKTLLSTVKYDIVKSARIYAGQGYTEHQAQEEWNMILHVLFEEETESSASSENIHEKNDNETNECTSSFETLFEQEPSSEVPKDSKLYMLAQKTVQHIEQYGKAPDFNKVIRAHNFIQTIYGTPLKEEEKEVVRLMVIKLLKKISFYLTYI

SEQ ID NO: 24 - protein, 233 aa, porcine circovirus 2 (virus)
MTYPRRRYRRRRHRPRSHLGQILRRRPWLVHPRHRYRWRRKNGIFNTRLSRTFGYTVKATTVRTPSWAVDMMRFNIDDFVPPGGGTNKISIPFEYYRIRKVKVEFWPCSPITQGDRGVGSTAVILDDNFVTKATALTYDPYVNYSSRHTIPQPFSYHSRYFTPKPVLDSTIDYFQPNNKRTQLWLRLQTSRNVDHVGLGTAFENSIYDQDYNIRVTMYVQFREFNLKDPPLKP

SEQ ID NO: 25 - protein, 233 aa, Artificial Sequence
  SYNTHETIC CONSTRUCT DERIVED FROM HUMAN THOUGHT
MTYPRRRYRRRRHRPRSHLGQILRRRPWLVHPRHRYRWRRKNGIFNTRLSRTFGYTVKATTVRTPSWAVDMMRFNIDDFVPPGGGTNKISIPFEYYRIRKVKVEFWPCSPITQGDRGVGSTAVILDDNFVTKATALTYDPYVDYSSRHTIPQPFSYHSRYFTPKPVLDSTIDYFQPNNKRTQLWLRLQTSRNVDHVGLGTAFENSIYDQDYNIRVTMYVQFREFNLKDPPLKP

SEQ ID NO: 26 - protein, 203 aa, Artificial Sequence
  SYNTHETIC CONSTRUCT DERIVED FROM HUMAN THOUGHT
AAADFILDISMKMEVIFKTDLRSSSQVVFHAGSLYNWFSVEIINSGRIVTTAIKTLLSTVKYDIVKSARIYAGQGYTEHQAQEEWNMILHVLFEEETESSASSENIHEKNDNETNECTSSFETLFEQEPSSEVPKDSKLYMLAQKTVQHIEQYGKAPDFNKVIRAHNFIQTIYGTPLKEEEKEVVRLMVIKLLKKISFYLTYI

SEQ ID NO: 27 - protein, 203 aa, Artificial Sequence
  SYNTHETIC CONSTRUCT DERIVED FROM HUMAN THOUGHT
AAADFILNISMKMEVIFKTDLRSSSQVVFHAGSLYNWFSVEIINSGRIVTTAIKTLLSTVKYDIVKSARIYAGQGYTEHQAQEEWNMILHVLFEEETESSASSENIHEKNDDETNECTSSFETLFEQEPSSEVPKDSKLYMLAQKTVQHIEQYGKAPDFNKVIRAHNFIQTIYGTPLKEEEKEVVRLMVIKLLKKISFYLTYI

SEQ ID NO: 28 - protein, 203 aa, Artificial Sequence
  SYNTHETIC CONSTRUCT DERIVED FROM HUMAN THOUGHT
AAADFILDISMKMEVIFKTDLRSSSQVVFHAGSLYNWFSVEIINSGRIVTTAIKTLLSTVKYDIVKSARIYAGQGYTEHQAQEEWNMILHVLFEEETESSASSENIHEKNDDETNECTSSFETLFEQEPSSEVPKDSKLYMLAQKTVQHIEQYGKAPDFNKVIRAHNFIQTIYGTPLKEEEKEVVRLMVIKLLKKISFYLTYI

SEQ ID NO: 29 - protein, 394 aa, human herpes simplex virus-1 (virus)
MGGAAARLGAVILFVVIVGLHGVRGKYALADASLKMADPNRFRGKDLPVLDRLTDPPGVRRVYHIQAGLPDPFQPPSLPITVYYAVLERACRSVLLNAPSEAPQIVRGASEDVRKQPYNLTIAWFRMGGNCAIPITVMEYTECSYNKSLGACPIRTQPRWNYYDSFSAVSEDNLGFLMHAPAFETAGTYLRLVKINDWTEITQFILEHRAKGSCKYALPLRIPPSACLSPQAYQQGVTVDSIGMLPRFIPENQRTVAVYSLKIAGWHGPKAPYTSTLLPPELSETPNATQPELAPEDPEDSALLEDPVGTVAPQIPPNWHIPSIQDAATPYHPPATPNNMGLIAGAVGGSLLAALVICGIVYWMHRRTRKAPKRIRLPHIREDDQPSSHQPLFY

SEQ ID NO: 30 - protein, 292 aa, human herpes simplex virus-1 (virus)
RGKYALADASLKMADPNRFRGKDLPVLDRLTDPPGVRRVYHIQAGLPDPFQPPSLPITVYYAVLERACRSVLLNAPSEAPQIVRGASEDVRKQPYNLTIAWFRMGGNCAIPITVMEYTECSYNKSLGACPIRTQPRWNYYDSFSAVSEDNLGFLMHAPAFETAGTYLRLVKINDWTEITQFILEHRAKGSCKYALPLRIPPSACLSPQAYQQGVTVDSIGMLPRFIPENQRTVAVYSLKIAGWHGPKAPYTSTLLPPELSETPNATQPELAPEDPEDSALLEDPVGTVAPQI

SEQ ID NO: 31 - protein, 79 aa, human herpes simplex virus-1 (virus)
PPNWHIPSIQDAATPYHPPATPNNMGLIAGAVGGSLLAALVICGIVYWMHRRTRKAPKRIRLPHIREDDQPSSHQPLFY

SEQ ID NO: 32 - protein, 10 aa, human herpes simplex virus-1 (virus)
PPNWHIPSIQ

SEQ ID NO: 33 - protein, 19 aa, human herpes simplex virus-1 (virus)
PPNWHIPSIQDAATPYHPP

SEQ ID NO: 34 - protein, 25 aa, human herpes simplex virus-1 (virus)
PPNWHIPSIQDAATPYHPPATPNNM

SEQ ID NO: 35 - protein, 244 aa, human herpes simplex virus-1 (virus)
KYALADASLKMADPNRFRGKDLPVLDRLTDPPGVRRVYHIQAGLPDPFQPPSLPITVYYAVLERACRSVLLNAPSEAPQIVRGASEDVRKQPYNLTIAWFRMGGNCAIPITVMEYTECSYNKSLGACPIRTQPRWNYYDSFSAVSEDNLGFLMHAPAFETAGTYLRLVKINDWTEITQFILEHRAKGSCKYALPLRIPPSACLSPQAYQQGVTVDSIGMLPRFIPENQRTVAVYSLKIAGWHGP

SEQ ID NO: 36 - protein, 125 aa, human herpes simplex virus-1 (virus)
KAPYTSTLLPPELSETPNATQPELAPEDPEDSALLEDPVGTVAPQIPPNWHIPSIQDAATPYHPPATPNNMGLIAGAVGGSLLAALVICGIVYWMHRRTRKAPKRIRLPHIREDDQPSSHQPLFY

SEQ ID NO: 37 - protein, 71 aa, human herpes simplex virus-1 (virus)
KAPYTSTLLPPELSETPNATQPELAPEDPEDSALLEDPVGTVAPQIPPNWHIPSIQDAATPYHPPATPNNM

SEQ ID NO: 38 - protein, 39 aa, human herpes simplex virus-1 (virus)
KAPYTSTLLPPELSETPNATQPELAPEDPEDSALLEDPV

SEQ ID NO: 39 - protein, 33 aa, human herpes simplex virus-1 (virus)
KAPYTSTLLPPELSETPNATQPELAPEDPEDSA

SEQ ID NO: 40 - protein, 230 aa, human herpes simplex virus-1 (virus)
KYALADASLKMADPNRFRGKDLPVLDRLTDPPGVRRVYHIQAGLPDPFQPPSLPITVYYAVLERACRSVLLNAPSEAPQIVRGASEDVRKQPYNLTIAWFRMGGNCAIPITVMEYTECSYNKSLGACPIRTQPRWNYYDSFSAVSEDNLGFLMHAPAFETAGTYLRLVKINDWTEITQFILEHRAKGSCKYALPLRIPPSACLSPQAYQQGVTVDSIGMLPRFIPENQRT

SEQ ID NO: 41 - protein, 139 aa, human herpes simplex virus-1 (virus)
VAVYSLKIAGWHGPKAPYTSTLLPPELSETPNATQPELAPEDPEDSALLEDPVGTVAPQIPPNWHIPSIQDAATPYHPPATPNNMGLIAGAVGGSLLAALVICGIVYWMHRRTRKAPKRIRLPHIREDDQPSSHQPLFY

SEQ ID NO: 42 - protein, 85 aa, human herpes simplex virus-1 (virus)
VAVYSLKIAGWHGPKAPYTSTLLPPELSETPNATQPELAPEDPEDSALLEDPVGTVAPQIPPNWHIPSIQDAATPYHPPATPNNM

SEQ ID NO: 43 - protein, 53 aa, human herpes simplex virus-1 (virus)
VAVYSLKIAGWHGPKAPYTSTLLPPELSETPNATQPELAPEDPEDSALLEDPV

SEQ ID NO: 44 - protein, 47 aa, human herpes simplex virus-1 (virus)
VAVYSLKIAGWHGPKAPYTSTLLPPELSETPNATQPELAPEDPEDSA

SEQ ID NO: 45 - protein, 288 aa, human herpes simplex virus-1 (virus)
KYALADASLKMADPNRFRGKDLPVLDRLTDPPGVRRVYHIQAGLPDPFQPPSLPITVYYAVLERACRSVLLNAPSEAPQIVRGASEDVRKQPYNLTIAWFRMGGNCAIPITVMEYTECSYNKSLGACPIRTQPRWNYYDSFSAVSEDNLGFLMHAPAFETAGTYLRLVKINDWTEITQFILEHRAKGSCKYALPLRIPPSACLSPQAYQQGVTVDSIGMLPRFIPENQRTVAVYSLKIAGWHGPKAPYTSTLLPPELSETPNATQPELAPEDPEDSALLEDPVGTVAP

SEQ ID NO: 46 - protein, 81 aa, human herpes simplex virus-1 (virus)
QIPPNWHIPSIQDAATPYHPPATPNNMGLIAGAVGGSLLAALVICGIVYWMHRRTRKAPKRIRLPHIREDDQPSSHQPLFY

SEQ ID NO: 47 - protein, 27 aa, human herpes simplex virus-1 (virus)
QIPPNWHIPSIQDAATPYHPPATPNNM

SEQ ID NO: 48 - protein, 21 aa, human herpes simplex virus-1 (virus)
QIPPNWHIPSIQDAATPYHPP

SEQ ID NO: 49 - protein, 17 aa, human herpes simplex virus-1 (virus)
QIPPNWHIPSIQDAATP

SEQ ID NO: 50 - protein, 208 aa, human herpes simplex virus-1 (virus)
PVLDRLTDPPGVRRVYHIQAGLPDPFQPPSLPITVYYAVLERACRSVLLNAPSEAPQIVRGASEDVRKQPYNLTIAWFRMGGNCAIPITVMEYTECSYNKSLGACPIRTQPRWNYYDSFSAVSEDNLGFLMHAPAFETAGTYLRLVKINDWTEITQFILEHRAKGSCKYALPLRIPPSACLSPQAYQQGVTVDSIGMLPRFIPENQRT

SEQ ID NO: 51 - protein, 222 aa, human herpes simplex virus-1 (virus)
PVLDRLTDPPGVRRVYHIQAGLPDPFQPPSLPITVYYAVLERACRSVLLNAPSEAPQIVRGASEDVRKQPYNLTIAWFRMGGNCAIPITVMEYTECSYNKSLGACPIRTQPRWNYYDSFSAVSEDNLGFLMHAPAFETAGTYLRLVKINDWTEITQFILEHRAKGSCKYALPLRIPPSACLSPQAYQQGVTVDSIGMLPRFIPENQRTVAVYSLKIAGWHGP

SEQ ID NO: 52 - protein, 266 aa, human herpes simplex virus-1 (virus)
PVLDRLTDPPGVRRVYHIQAGLPDPFQPPSLPITVYYAVLERACRSVLLNAPSEAPQIVRGASEDVRKQPYNLTIAWFRMGGNCAIPITVMEYTECSYNKSLGACPIRTQPRWNYYDSFSAVSEDNLGFLMHAPAFETAGTYLRLVKINDWTEITQFILEHRAKGSCKYALPLRIPPSACLSPQAYQQGVTVDSIGMLPRFIPENQRTVAVYSLKIAGWHGPKAPYTSTLLPPELSETPNATQPELAPEDPEDSALLEDPVGTVAP

SEQ ID NO: 53 - protein, 201 aa, human herpes simplex virus-1 (virus)
DPPGVRRVYHIQAGLPDPFQPPSLPITVYYAVLERACRSVLLNAPSEAPQIVRGASEDVRKQPYNLTIAWFRMGGNCAIPITVMEYTECSYNKSLGACPIRTQPRWNYYDSFSAVSEDNLGFLMHAPAFETAGTYLRLVKINDWTEITQFILEHRAKGSCKYALPLRIPPSACLSPQAYQQGVTVDSIGMLPRFIPENQRT

SEQ ID NO: 54 - protein, 215 aa, human herpes simplex virus-1 (virus)
DPPGVRRVYHIQAGLPDPFQPPSLPITVYYAVLERACRSVLLNAPSEAPQIVRGASEDVRKQPYNLTIAWFRMGGNCAIPITVMEYTECSYNKSLGACPIRTQPRWNYYDSFSAVSEDNLGFLMHAPAFETAGTYLRLVKINDWTEITQFILEHRAKGSCKYALPLRIPPSACLSPQAYQQGVTVDSIGMLPRFIPENQRTVAVYSLKIAGWHGP

SEQ ID NO: 55 - protein, 259 aa, human herpes simplex virus-1 (virus)
DPPGVRRVYHIQAGLPDPFQPPSLPITVYYAVLERACRSVLLNAPSEAPQIVRGASEDVRKQPYNLTIAWFRMGGNCAIPITVMEYTECSYNKSLGACPIRTQPRWNYYDSFSAVSEDNLGFLMHAPAFETAGTYLRLVKINDWTEITQFILEHRAKGSCKYALPLRIPPSACLSPQAYQQGVTVDSIGMLPRFIPENQRTVAVYSLKIAGWHGPKAPYTSTLLPPELSETPNATQPELAPEDPEDSALLEDPVGTVAP

SEQ ID NO: 56 - protein, 198 aa, human herpes simplex virus-1 (virus)
GVRRVYHIQAGLPDPFQPPSLPITVYYAVLERACRSVLLNAPSEAPQIVRGASEDVRKQPYNLTIAWFRMGGNCAIPITVMEYTECSYNKSLGACPIRTQPRWNYYDSFSAVSEDNLGFLMHAPAFETAGTYLRLVKINDWTEITQFILEHRAKGSCKYALPLRIPPSACLSPQAYQQGVTVDSIGMLPRFIPENQRT

SEQ ID NO: 57 - protein, 212 aa, human herpes simplex virus-1 (virus)
GVRRVYHIQAGLPDPFQPPSLPITVYYAVLERACRSVLLNAPSEAPQIVRGASEDVRKQPYNLTIAWFRMGGNCAIPITVMEYTECSYNKSLGACPIRTQPRWNYYDSFSAVSEDNLGFLMHAPAFETAGTYLRLVKINDWTEITQFILEHRAKGSCKYALPLRIPPSACLSPQAYQQGVTVDSIGMLPRFIPENQRTVAVYSLKIAGWHGP

SEQ ID NO: 58 - protein, 256 aa, human herpes simplex virus-1 (virus)
GVRRVYHIQAGLPDPFQPPSLPITVYYAVLERACRSVLLNAPSEAPQIVRGASEDVRKQPYNLTIAWFRMGGNCAIPITVMEYTECSYNKSLGACPIRTQPRWNYYDSFSAVSEDNLGFLMHAPAFETAGTYLRLVKINDWTEITQFILEHRAKGSCKYALPLRIPPSACLSPQAYQQGVTVDSIGMLPRFIPENQRTVAVYSLKIAGWHGPKAPYTSTLLPPELSETPNATQPELAPEDPEDSALLEDPVGTVAP

SEQ ID NO: 59 - protein, 267 aa, human herpes simplex virus-1 (virus)
KYALADASLKMADPNRFRGKDLPVLDRLTDPPGVRRVYHIQAGLPDPFQPPSLPITVYYAVLERACRSVLLNAPSEAPQIVRGASEDVRKQPYNLTIAWFRMGGNCAIPITVMEYTECSYNKSLGACPIRTQPRWNYYDSFSAVSEDNLGFLMHAPAFETAGTYLRLVKINDWTEITQFILEHRAKGSCKYALPLRIPPSACLSPQAYQQGVTVDSIGMLPRFIPENQRTVAVYSLKIAGWHGPKAPYTSTLLPPELSETPNATQPE

SEQ ID NO: 60 - protein, 92 aa, human herpes simplex virus-1 (virus)
LLEDPVGTVAPQIPPNWHIPSIQDAATPYHPPATPNNMGLIAGAVGGSLLAALVICGIVYWMHRRTRKAPKRIRLPHIREDDQPSSHQPLFY

SEQ ID NO: 61 - protein, 50 aa, human herpes simplex virus-1 (virus)
PELAPEDPEDSALLEDPVGTVAPQIPPNWHIPSIQDAATPYHPPATPNNM

SEQ ID NO: 62 - protein, 18 aa, human herpes simplex virus-1 (virus)
PELAPEDPEDSALLEDPV

SEQ ID NO: 63 - protein, 12 aa, human herpes simplex virus-1 (virus)
PELAPEDPEDSA

SEQ ID NO: 64 - protein, 255 aa, human herpes simplex virus-1 (virus)
PVLDRLTDPPGVRRVYHIQAGLPDPFQPPSLPITVYYAVLERACRSVLLNAPSEAPQIVRGASEDVRKQPYNLTIAWFRMGGNCAIPITVMEYTECSYNKSLGACPIRTQPRWNYYDSFSAVSEDNLGFLMHAPAFETAGTYLRLVKINDWTEITQFILEHRAKGSCKYALPLRIPPSACLSPQAYQQGVTVDSIGMLPRFIPENQRTVAVYSLKIAGWHGPKAPYTSTLLPPELSETPNATQPELAPEDPEDSA

SEQ ID NO: 65 - protein, 293 aa, human herpes simplex virus-1 (virus)
PVLDRLTDPPGVRRVYHIQAGLPDPFQPPSLPITVYYAVLERACRSVLLNAPSEAPQIVRGASEDVRKQPYNLTIAWFRMGGNCAIPITVMEYTECSYNKSLGACPIRTQPRWNYYDSFSAVSEDNLGFLMHAPAFETAGTYLRLVKINDWTEITQFILEHRAKGSCKYALPLRIPPSACLSPQAYQQGVTVDSIGMLPRFIPENQRTVAVYSLKIAGWHGPKAPYTSTLLPPELSETPNATQPELAPEDPEDSALLEDPVGTVAPQIPPNWHIPSIQDAATPYHPPATPNNM

SEQ ID NO: 66 - protein, 347 aa, human herpes simplex virus-1 (virus)
PVLDRLTDPPGVRRVYHIQAGLPDPFQPPSLPITVYYAVLERACRSVLLNAPSEAPQIVRGASEDVRKQPYNLTIAWFRMGGNCAIPITVMEYTECSYNKSLGACPIRTQPRWNYYDSFSAVSEDNLGFLMHAPAFETAGTYLRLVKINDWTEITQFILEHRAKGSCKYALPLRIPPSACLSPQAYQQGVTVDSIGMLPRFIPENQRTVAVYSLKIAGWHGPKAPYTSTLLPPELSETPNATQPELAPEDPEDSALLEDPVGTVAPQIPPNWHIPSIQDAATPYHPPATPNNMGLIAGAVGGSLLAALVICGIVYWMHRRTRKAPKRIRLPHIREDDQPSSHQPLFY

SEQ ID NO: 67 - protein, 248 aa, human herpes simplex virus-1 (virus)
DPPGVRRVYHIQAGLPDPFQPPSLPITVYYAVLERACRSVLLNAPSEAPQIVRGASEDVRKQPYNLTIAWFRMGGNCAIPITVMEYTECSYNKSLGACPIRTQPRWNYYDSFSAVSEDNLGFLMHAPAFETAGTYLRLVKINDWTEITQFILEHRAKGSCKYALPLRIPPSACLSPQAYQQGVTVDSIGMLPRFIPENQRTVAVYSLKIAGWHGPKAPYTSTLLPPELSETPNATQPELAPEDPEDSA

SEQ ID NO: 68 - protein, 254 aa, human herpes simplex virus-1 (virus)
DPPGVRRVYHIQAGLPDPFQPPSLPITVYYAVLERACRSVLLNAPSEAPQIVRGASEDVRKQPYNLTIAWFRMGGNCAIPITVMEYTECSYNKSLGACPIRTQPRWNYYDSFSAVSEDNLGFLMHAPAFETAGTYLRLVKINDWTEITQFILEHRAKGSCKYALPLRIPPSACLSPQAYQQGVTVDSIGMLPRFIPENQRTVAVYSLKIAGWHGPKAPYTSTLLPPELSETPNATQPELAPEDPEDSALLEDPV

SEQ ID NO: 69 - protein, 286 aa, human herpes simplex virus-1 (virus)
DPPGVRRVYHIQAGLPDPFQPPSLPITVYYAVLERACRSVLLNAPSEAPQIVRGASEDVRKQPYNLTIAWFRMGGNCAIPITVMEYTECSYNKSLGACPIRTQPRWNYYDSFSAVSEDNLGFLMHAPAFETAGTYLRLVKINDWTEITQFILEHRAKGSCKYALPLRIPPSACLSPQAYQQGVTVDSIGMLPRFIPENQRTVAVYSLKIAGWHGPKAPYTSTLLPPELSETPNATQPELAPEDPEDSALLEDPVGTVAPQIPPNWHIPSIQDAATPYHPPATPNNM

SEQ ID NO: 70 - protein, 340 aa, human herpes simplex virus-1 (virus)
DPPGVRRVYHIQAGLPDPFQPPSLPITVYYAVLERACRSVLLNAPSEAPQIVRGASEDVRKQPYNLTIAWFRMGGNCAIPITVMEYTECSYNKSLGACPIRTQPRWNYYDSFSAVSEDNLGFLMHAPAFETAGTYLRLVKINDWTEITQFILEHRAKGSCKYALPLRIPPSACLSPQAYQQGVTVDSIGMLPRFIPENQRTVAVYSLKIAGWHGPKAPYTSTLLPPELSETPNATQPELAPEDPEDSALLEDPVGTVAPQIPPNWHIPSIQDAATPYHPPATPNNMGLIAGAVGGSLLAALVICGIVYWMHRRTRKAPKRIRLPHIREDDQPSSHQPLFY

SEQ ID NO: 71 - protein, 245 aa, human herpes simplex virus-1 (virus)
GVRRVYHIQAGLPDPFQPPSLPITVYYAVLERACRSVLLNAPSEAPQIVRGASEDVRKQPYNLTIAWFRMGGNCAIPITVMEYTECSYNKSLGACPIRTQPRWNYYDSFSAVSEDNLGFLMHAPAFETAGTYLRLVKINDWTEITQFILEHRAKGSCKYALPLRIPPSACLSPQAYQQGVTVDSIGMLPRFIPENQRTVAVYSLKIAGWHGPKAPYTSTLLPPELSETPNATQPELAPEDPEDSA

SEQ ID NO: 72 - protein, 233 aa, human herpes simplex virus-1 (virus)
GVRRVYHIQAGLPDPFQPPSLPITVYYAVLERACRSVLLNAPSEAPQIVRGASEDVRKQPYNLTIAWFRMGGNCAIPITVMEYTECSYNKSLGACPIRTQPRWNYYDSFSAVSEDNLGFLMHAPAFETAGTYLRLVKINDWTEITQFILEHRAKGSCKYALPLRIPPSACLSPQAYQQGVTVDSIGMLPRFIPENQRTVAVYSLKIAGWHGPKAPYTSTLLPPELSETPNATQ

SEQ ID NO: 73 - protein, 283 aa, human herpes simplex virus-1 (virus)
GVRRVYHIQAGLPDPFQPPSLPITVYYAVLERACRSVLLNAPSEAPQIVRGASEDVRKQPYNLTIAWFRMGGNCAIPITVMEYTECSYNKSLGACPIRTQPRWNYYDSFSAVSEDNLGFLMHAPAFETAGTYLRLVKINDWTEITQFILEHRAKGSCKYALPLRIPPSACLSPQAYQQGVTVDSIGMLPRFIPENQRTVAVYSLKIAGWHGPKAPYTSTLLPPELSETPNATQPELAPEDPEDSALLEDPVGTVAPQIPPNWHIPSIQDAATPYHPPATPNNM

SEQ ID NO: 74 - protein, 337 aa, human herpes simplex virus-1 (virus)
GVRRVYHIQAGLPDPFQPPSLPITVYYAVLERACRSVLLNAPSEAPQIVRGASEDVRKQPYNLTIAWFRMGGNCAIPITVMEYTECSYNKSLGACPIRTQPRWNYYDSFSAVSEDNLGFLMHAPAFETAGTYLRLVKINDWTEITQFILEHRAKGSCKYALPLRIPPSACLSPQAYQQGVTVDSIGMLPRFIPENQRTVAVYSLKIAGWHGPKAPYTSTLLPPELSETPNATQPELAPEDPEDSALLEDPVGTVAPQIPPNWHIPSIQDAATPYHPPATPNNMGLIAGAVGGSLLAALVICGIVYWMHRRTRKAPKRIRLPHIREDDQPSSHQPLFY

SEQ ID NO: 75 - protein, 54 aa, human herpes simplex virus-1 (virus)
GLIAGAVGGSLLAALVICGIVYWMHRRTRKAPKRIRLPHIREDDQPSSHQPLFY

SEQ ID NO: 76 - protein, 32 aa, human herpes simplex virus-1 (virus)
KYALADASLKMADPNRFRGKDLPVLDRLTDPP

SEQ ID NO: 77 - protein, 29 aa, human herpes simplex virus-1 (virus)
KYALADASLKMADPNRFRGKDLPVLDRLT

SEQ ID NO: 78 - protein, 22 aa, human herpes simplex virus-1 (virus)
KYALADASLKMADPNRFRGKDL

SEQ ID NO: 79 - protein, 25 aa, human herpes simplex virus-1 (virus)
MGGAAARLGAVILFVVIVGLHGVRG

SEQ ID NO: 80 - protein, 23 aa, human herpes simplex virus-1 (virus)
MGGAAARLGAVILFVVIVGLHGV

SEQ ID NO: 81 - protein, 21 aa, human herpes simplex virus-1 (virus)
GLIAGAVGGSLLAALVICGIV

SEQ ID NO: 82 - protein, 315 aa, human herpes simplex virus-1 (virus)
KYALADASLKMADPNRFRGKDLPVLDRLTDPPGVRRVYHIQAGLPDPFQPPSLPITVYYAVLERACRSVLLNAPSEAPQIVRGASEDVRKQPYNLTIAWFRMGGNCAIPITVMEYTECSYNKSLGACPIRTQPRWNYYDSFSAVSEDNLGFLMHAPAFETAGTYLRLVKINDWTEITQFILEHRAKGSCKYALPLRIPPSACLSPQAYQQGVTVDSIGMLPRFIPENQRTVAVYSLKIAGWHGPKAPYTSTLLPPELSETPNATQPELAPEDPEDSALLEDPVGTVAPQIPPNWHIPSIQDAATPYHPPATPNNM

SEQ ID NO: 83 - protein, 369 aa, human herpes simplex virus-1 (virus)
KYALADASLKMADPNRFRGKDLPVLDRLTDPPGVRRVYHIQAGLPDPFQPPSLPITVYYAVLERACRSVLLNAPSEAPQIVRGASEDVRKQPYNLTIAWFRMGGNCAIPITVMEYTECSYNKSLGACPIRTQPRWNYYDSFSAVSEDNLGFLMHAPAFETAGTYLRLVKINDWTEITQFILEHRAKGSCKYALPLRIPPSACLSPQAYQQGVTVDSIGMLPRFIPENQRTVAVYSLKIAGWHGPKAPYTSTLLPPELSETPNATQPELAPEDPEDSALLEDPVGTVAPQIPPNWHIPSIQDAATPYHPPATPNNMGLIAGAVGGSLLAALVICGIVYWMHRRTRKAPKRIRLPHIREDDQPSSHQPLFY

SEQ ID NO: 84 - protein, 394 aa, Artificial Sequence
  SYNTHETIC CONSTRUCT DERIVED FROM HUMAN THOUGHT
MGGAAARLGAVILFVVIVGLHGVRGKYALADASLKMADPNRFRGKDLPVLDRLTDPPGVRRVYHIQAGLPDPFQPPSLPITVYYAVLERACRSVLLNAPSEAPQIVRGASEDVRKQPYNLTIAWFRMGGNCAIPITVMEYTECSYNKSLGACPIRTQPRWNYYDSFSAVSEDNLGFLMHAPAFETAGTYLRLVKINDWTEITQFILEHRAKGSCKYALPLRIPPSACLSPQAYQQGVTVDSIGMLPRFIPENQRTVAVYSLKIAGWHGPKAPYTSTLLPPELSETPNATQPELAPEDPEDSALLEDPVGTVAPQIPPNAHIPSIQDAATPYHPPATPNNMGLIAGAVGGSLLAALVICGIVYWMHRRTRKAPKRIRLPHIREDDQPSSHQPLFY

SEQ ID NO: 85 - DNA, 2531 bp, Homo sapiens
agaggaagaggtagctccacaggaggtacagctgcttacacatctctcctcagagctgtcccttgacttgggggtgaatttcaggccaacagggcttcctgggatacaagagcgttctccatggatctgccttactaccatggacgtctgaccaagcaagactgtgagaccttgctgctcaaggaaggggtggatggcaactttcttttaagagacagcgagtcgataccaggagtcctgtgcctctgtgtctcgtttaaaaatattgtctacacataccgaatcttcagagagaaacacgggtattacaggatacagactgcagaaggttctccaaaacaggtctttccaagcctaaaggaactgatctccaaatttgaaaaaccaaatcaggggatggtggttcaccttttaaagccaataaagagaaccagccccagcttgagatggagaggattgaaattagagttggaaacatttgtgaacagtaacagcgattatgtggatgtcttgccttgaagataaggctgccggacaaagcaagttgaagagatgagtaacagttctcactgatgacccacttctgcaggcataggtccagagcaccaaactctagtggacaattcagactctcctggttgtgtaactgaagatgttctgcccaccagcaccagaggtcactctccacatccccgcctcccagacatataccaggagcaatttcaaaaccctctccagtttcactcttctttcttggaatgggacagcctgaacattttccctttgacttgttaaaggtaccaccctacatcatggttgacaccctcctttggaccatgcagtcagaggggcagctttatacagaggaggggcacacttgtctgtgagtttgaagccctgagttccagtcctgtggctgtgtgactttgaacacgtttctgcccatctccaggtcttagtttctttgtctctgtggttgggtgggatgataaacattgccccagtctctctgttgagcctgcttgtgtcaggtgaaggtgagggatcgggagtgatggagatgcatacagatcagcaccttctctgtacctgctggacccccatgtgcacccttctccctccagcctgggctactctcctcctggttctttctaatcttaaacttcctggtgagcattgccccagccacactttctccctggttttgcttaattccacttatgcatcagtcatttcaacagcatgaatgtggttctgtacagtgatgtatgtggagatttctaaaatattctatgtgtgatttctgttcccaactaggttctaagtgccatcaaagcacggttgggtctcccttgtatcttccacagtgtgtagaaatttgtgctgcccagagctgtgcctagttcatagaaactgactggaagcacattgctgagggaggtttgttgaattggtttttaaggtttactgaaattgatttgctgaatttttctgctagttcaaaatgtgaattaggacctggtcagtttgaaatataccaaattctatgccctttctcttacctatcatcaaattgtagtaatgtatttcaccccactggacttatcttcagagttttaaaagagaggagctctcgacttagaggtaatatgaacagatgaacagacactgtggctggagccccaaagtgtggagcattgtgagatttggggtcacagcaatttatggctactattccctgggtctggtaggtaggacaaatgtcctcttttacttttcaaaactggcttaggtattcatggaccttgattcttctatatacattttataataaatacgtgaaattgcttaaaacctctttttggaatttttaatgaacttgcaacaaatttgtaaataggagagaactgacgttcttgtgatgttttcccatgcataaacatgccacatccatgttcttgggtcatcttttttgccctttcatggagtcataaattttcccaactgaagtcttgtatattctgttagattaattcctatttctagttgctgtaaatgatatcttatgttttattacatttctaataggatatggtgttggtgaaatgttaaccctctcattagatctactagtttacctgttgattctattgtgttttctatgtaaatgattttgtcagctataaataataacattttattttctctttccttgcaatacctatgctcatttattttttatgtttacccattggttagggcctcctgtatacattaaacagttcatagtcatgatagtgagtattcttacactgttcccagtattacagggaatgcttagaaattttctttatttaaacattatgtttgttgtagccttgttaaaggctattttataatttttactagaaatattttgacatttattgtgatttttttctatctctaatctattgagatagtcacattccttttgtcttcactccattataaaggtaagttaccttaataaaattgttgatatcatttca

SEQ ID NO: 86 - DNA, 1172 bp, Mus musculus
tactccaagaacgatctttccaaacctacaggaattggtctccaaatatggaaaaccgggtcaaggattggtggttcacctttcaaacccaataatgagaaacaacctatgccaaagagggagaagaatggagttagagctgaatgtttatgagaacactgataaggagtatgtggacgtcttgccttgaagacaaggacattggacaaagcaagctagaggagagatggctctgctctcagctgccacatctgcaagtgtgaatctaaaatgccaatttctagtgagccactgagatcctctgattgggatagcaagatctgttctgcaaccttggaggagtcatttctcagacgcctgcctcctggcatattcctcaagaggctccaaagccactccttacttcttactcccctatcttgaaattggacagccagaacccaatctcctgtctggatagaggcagctcccctcattccttcatggttgacaacttccgacaggacaatgggaagtgaagtggaaagagtacttcatacagcagaaagaatactcaatagtgacttcagagttcccatcctgtgactctgtggctttggagaaatcaccccctcgttctcagcttcttcatctattaaacaattggttgatacacattacctggactctctattgagccaggtggagcaggggtttgagcagcaggatcaggatctaaggatactgaaggagcaaacatgtccttcctacctgtgaggtcgtggtcctgatgggggctgtgacccaacctgaaactgtaggttttttcacctgagctccagttcctgaataataaatactccttgacttgttacttatgaattaatgcctaaactttgagctagaattcttacatagattgtaacttactgaacccatttataccattctgttctgttgcatgcctgcttacctctcctcagtgtcatacctttgacttcctcccagacttggtcgtagcaaatctttccttgcctaattatttcccagagttactctcttctttctctgacagatttccttccttcaaatcctgccttaacttcttggccatcaggtatttattgacaggtgatacttccacagaatacacgagagattattcctactctacccattctcccgttcccttc

SEQ ID NO: 87 - protein, 45 aa, human herpes simplex virus-1 (virus)
VAVYSLKIAGWHGPKAPYTSTLLPPELSETPNATQPELAPEDPED

SEQ ID NO: 88 - protein, 55 aa, human herpes simplex virus-1 (virus)
VAVYSLKIAGWHGPKAPYTSTLLPPELSETPNATQPELAPEDPEDSALLEDPVGT

SEQ ID NO: 89 - protein, 35 aa, human herpes simplex virus-1 (virus)
VAVYSLKIAGWHGPKAPYTSTLLPPELSETPNATQ

SEQ ID NO: 90 - protein, 20 aa, human herpes simplex virus-1 (virus)
VAVYSLKIAGWHGPKAPYTS

SEQ ID NO: 91 - protein, 229 aa, human herpes simplex virus-1 (virus)
KYALADASLKMADPNRFRGKDLPVLDRLTDPPGVRRVYHIQAGLPDPFQPPSLPITVYYAVLERACRSVLLNAPSEAPQIVRGASEDVRKQPYNLTIAWFRMGGNCAIPITVMEYTECSYNKSLGACPIRTQPRWNYYDSFSAVSEDNLGFLMHAPAFETAGTYLRLVKINDWTEITQFILEHRAKGSCKYALPLRIPPSACLSPQAYQQGVTVDSIGMLPRFIPENQR

SEQ ID NO: 92 - protein, 275 aa, human herpes simplex virus-1 (virus)
KYALADASLKMADPNRFRGKDLPVLDRLTDPPGVRRVYHIQAGLPDPFQPPSLPITVYYAVLERACRSVLLNAPSEAPQIVRGASEDVRKQPYNLTIAWFRMGGNCAIPITVMEYTECSYNKSLGACPIRTQPRWNYYDSFSAVSEDNLGFLMHAPAFETAGTYLRLVKINDWTEITQFILEHRAKGSCKYALPLRIPPSACLSPQAYQQGVTVDSIGMLPRFIPENQRTVAVYSLKIAGWHGPKAPYTSTLLPPELSETPNATQPELAPEDPED

SEQ ID NO: 93 - protein, 285 aa, human herpes simplex virus-1 (virus)
KYALADASLKMADPNRFRGKDLPVLDRLTDPPGVRRVYHIQAGLPDPFQPPSLPITVYYAVLERACRSVLLNAPSEAPQIVRGASEDVRKQPYNLTIAWFRMGGNCAIPITVMEYTECSYNKSLGACPIRTQPRWNYYDSFSAVSEDNLGFLMHAPAFETAGTYLRLVKINDWTEITQFILEHRAKGSCKYALPLRIPPSACLSPQAYQQGVTVDSIGMLPRFIPENQRTVAVYSLKIAGWHGPKAPYTSTLLPPELSETPNATQPELAPEDPEDSALLEDPVGT

SEQ ID NO: 94 - protein, 265 aa, human herpes simplex virus-1 (virus)
KYALADASLKMADPNRFRGKDLPVLDRLTDPPGVRRVYHIQAGLPDPFQPPSLPITVYYAVLERACRSVLLNAPSEAPQIVRGASEDVRKQPYNLTIAWFRMGGNCAIPITVMEYTECSYNKSLGACPIRTQPRWNYYDSFSAVSEDNLGFLMHAPAFETAGTYLRLVKINDWTEITQFILEHRAKGSCKYALPLRIPPSACLSPQAYQQGVTVDSIGMLPRFIPENQRTVAVYSLKIAGWHGPKAPYTSTLLPPELSETPNATQ

SEQ ID NO: 95 - protein, 250 aa, human herpes simplex virus-1 (virus)
KYALADASLKMADPNRFRGKDLPVLDRLTDPPGVRRVYHIQAGLPDPFQPPSLPITVYYAVLERACRSVLLNAPSEAPQIVRGASEDVRKQPYNLTIAWFRMGGNCAIPITVMEYTECSYNKSLGACPIRTQPRWNYYDSFSAVSEDNLGFLMHAPAFETAGTYLRLVKINDWTEITQFILEHRAKGSCKYALPLRIPPSACLSPQAYQQGVTVDSIGMLPRFIPENQRTVAVYSLKIAGWHGPKAPYTS

SEQ ID NO: 96 - protein, 300 aa, human herpes simplex virus-1 (virus)
MGGAAARLGAVILFVVIVGLHGVRGKYALADASLKMADPNRFRGKDLPVLDRLTDPPGVRRVYHIQAGLPDPFQPPSLPITVYYAVLERACRSVLLNAPSEAPQIVRGASEDVRKQPYNLTIAWFRMGGNCAIPITVMEYTECSYNKSLGACPIRTQPRWNYYDSFSAVSEDNLGFLMHAPAFETAGTYLRLVKINDWTEITQFILEHRAKGSCKYALPLRIPPSACLSPQAYQQGVTVDSIGMLPRFIPENQRTVAVYSLKIAGWHGPKAPYTSTLLPPELSETPNATQPELAPEDPED

SEQ ID NO: 97 - protein, 310 aa, human herpes simplex virus-1 (virus)
MGGAAARLGAVILFVVIVGLHGVRGKYALADASLKMADPNRFRGKDLPVLDRLTDPPGVRRVYHIQAGLPDPFQPPSLPITVYYAVLERACRSVLLNAPSEAPQIVRGASEDVRKQPYNLTIAWFRMGGNCAIPITVMEYTECSYNKSLGACPIRTQPRWNYYDSFSAVSEDNLGFLMHAPAFETAGTYLRLVKINDWTEITQFILEHRAKGSCKYALPLRIPPSACLSPQAYQQGVTVDSIGMLPRFIPENQRTVAVYSLKIAGWHGPKAPYTSTLLPPELSETPNATQPELAPEDPEDSALLEDPVGT

SEQ ID NO: 98 - protein, 290 aa, human herpes simplex virus-1 (virus)
MGGAAARLGAVILFVVIVGLHGVRGKYALADASLKMADPNRFRGKDLPVLDRLTDPPGVRRVYHIQAGLPDPFQPPSLPITVYYAVLERACRSVLLNAPSEAPQIVRGASEDVRKQPYNLTIAWFRMGGNCAIPITVMEYTECSYNKSLGACPIRTQPRWNYYDSFSAVSEDNLGFLMHAPAFETAGTYLRLVKINDWTEITQFILEHRAKGSCKYALPLRIPPSACLSPQAYQQGVTVDSIGMLPRFIPENQRTVAVYSLKIAGWHGPKAPYTSTLLPPELSETPNATQ

SEQ ID NO: 99 - protein, 275 aa, human herpes simplex virus-1 (virus)
MGGAAARLGAVILFVVIVGLHGVRGKYALADASLKMADPNRFRGKDLPVLDRLTDPPGVRRVYHIQAGLPDPFQPPSLPITVYYAVLERACRSVLLNAPSEAPQIVRGASEDVRKQPYNLTIAWFRMGGNCAIPITVMEYTECSYNKSLGACPIRTQPRWNYYDSFSAVSEDNLGFLMHAPAFETAGTYLRLVKINDWTEITQFILEHRAKGSCKYALPLRIPPSACLSPQAYQQGVTVDSIGMLPRFIPENQRTVAVYSLKIAGWHGPKAPYTS

SEQ ID NO: 100 - protein, 255 aa, human herpes simplex virus-1 (virus)
MGGAAARLGAVILFVVIVGLHGVRGKYALADASLKMADPNRFRGKDLPVLDRLTDPPGVRRVYHIQAGLPDPFQPPSLPITVYYAVLERACRSVLLNAPSEAPQIVRGASEDVRKQPYNLTIAWFRMGGNCAIPITVMEYTECSYNKSLGACPIRTQPRWNYYDSFSAVSEDNLGFLMHAPAFETAGTYLRLVKINDWTEITQFILEHRAKGSCKYALPLRIPPSACLSPQAYQQGVTVDSIGMLPRFIPENQRT

SEQ ID NO: 101 - protein, 32 aa, human herpes simplex virus-1 (virus)
GTVAPQIPPNWHIPSIQDAATPYHPPATPNNM

SEQ ID NO: 102 - protein, 243 aa, human herpes simplex virus-1 (virus)
PVLDRLTDPPGVRRVYHIQAGLPDPFQPPSLPITVYYAVLERACRSVLLNAPSEAPQIVRGASEDVRKQPYNLTIAWFRMGGNCAIPITVMEYTECSYNKSLGACPIRTQPRWNYYDSFSAVSEDNLGFLMHAPAFETAGTYLRLVKINDWTEITQFILEHRAKGSCKYALPLRIPPSACLSPQAYQQGVTVDSIGMLPRFIPENQRTVAVYSLKIAGWHGPKAPYTSTLLPPELSETPNATQ

SEQ ID NO: 103 - protein, 340 aa, human herpes simplex virus-1 (virus)
MGGAAARLGAVILFVVIVGLHGVRGKYALADASLKMADPNRFRGKDLPVLDRLTDPPGVRRVYHIQAGLPDPFQPPSLPITVYYAVLERACRSVLLNAPSEAPQIVRGASEDVRKQPYNLTIAWFRMGGNCAIPITVMEYTECSYNKSLGACPIRTQPRWNYYDSFSAVSEDNLGFLMHAPAFETAGTYLRLVKINDWTEITQFILEHRAKGSCKYALPLRIPPSACLSPQAYQQGVTVDSIGMLPRFIPENQRTVAVYSLKIAGWHGPKAPYTSTLLPPELSETPNATQPELAPEDPEDSALLEDPVGTVAPQIPPNWHIPSIQDAATPYHPPATPNNM

SEQ ID NO: 104 - protein, 38 aa, human herpes simplex virus-1 (virus)
LLEDPVGTVAPQIPPNWHIPSIQDAATPYHPPATPNNM

SEQ ID NO: 105 - protein, 86 aa, human herpes simplex virus-1 (virus)
GTVAPQIPPNWHIPSIQDAATPYHPPATPNNMGLIAGAVGGSLLAALVICGIVYWMHRRTRKAPKRIRLPHIREDDQPSSHQPLFY

SEQ ID NO: 106 - protein, 71 aa, human herpes simplex virus-1 (virus); identical to SEQ ID NO: 37

SEQ ID NO: 107 - protein, 104 aa, human herpes simplex virus-1 (virus)
PELAPEDPEDSALLEDPVGTVAPQIPPNWHIPSIQDAATPYHPPATPNNMGLIAGAVGGSLLAALVICGIVYWMHRRTRKAPKRIRLPHIREDDQPSSHQPLFY

SEQ ID NO: 108 - protein, 269 aa, human herpes simplex virus-1 (virus)
MGGAAARLGAVILFVVIVGLHGVRGKYALADASLKMADPNRFRGKDLPVLDRLTDPPGVRRVYHIQAGLPDPFQPPSLPITVYYAVLERACRSVLLNAPSEAPQIVRGASEDVRKQPYNLTIAWFRMGGNCAIPITVMEYTECSYNKSLGACPIRTQPRWNYYDSFSAVSEDNLGFLMHAPAFETAGTYLRLVKINDWTEITQFILEHRAKGSCKYALPLRIPPSACLSPQAYQQGVTVDSIGMLPRFIPENQRTVAVYSLKIAGWHGP

SEQ ID NO: 109 - protein, 70 aa, human herpes simplex virus-1 (virus)
DSALLEDPVGTVAPQIPPNWHIPSIQDAATPYHPPATPNNMGLIAGAVGGSLLAALVICGIVYWMHRRTR

SEQ ID NO: 110 - protein, 244 aa, human herpes simplex virus-1 (virus); identical to SEQ ID NO: 35

SEQ ID NO: 111 - protein, 222 aa, human herpes simplex virus-1 (virus); identical to SEQ ID NO: 51

SEQ ID NO: 112 - protein, 215 aa, human herpes simplex virus-1 (virus); identical to SEQ ID NO: 54

SEQ ID NO: 113 - protein, 212 aa, human herpes simplex virus-1 (virus); identical to SEQ ID NO: 57

SEQ ID NO: 114 - protein, 41 aa, human herpes simplex virus-1 (virus)
DSALLEDPVGTVAPQIPPNWHIPSIQDAATPYHPPATPNNM

SEQ ID NO: 115 - protein, 235 aa, human herpes simplex virus-1 (virus)
KYALADASLKMADPNRFRGKDLPVLDRLTDPPGVRRVYHIQAGLPDPFQPPSLPITVYYAVLERACRSVLLNAPSEAPQIVRGASEDVRKQPYNLTIAWFRMGGNCAIPITVMEYTECSYNKSLGACPIRTQPRWNYYDSFSAVSEDNLGFLMHAPAFETAGTYLRLVKINDWTEITQFILEHRAKGSCKYALPLRIPPSACLSPQAYQQGVTVDSIGMLPRFIPENQRTVAVYS

SEQ ID NO: 116 - protein, 213 aa, human herpes simplex virus-1 (virus)
PVLDRLTDPPGVRRVYHIQAGLPDPFQPPSLPITVYYAVLERACRSVLLNAPSEAPQIVRGASEDVRKQPYNLTIAWFRMGGNCAIPITVMEYTECSYNKSLGACPIRTQPRWNYYDSFSAVSEDNLGFLMHAPAFETAGTYLRLVKINDWTEITQFILEHRAKGSCKYALPLRIPPSACLSPQAYQQGVTVDSIGMLPRFIPENQRTVAVYS

SEQ ID NO: 117 - protein, 206 aa, human herpes simplex virus-1 (virus)
DPPGVRRVYHIQAGLPDPFQPPSLPITVYYAVLERACRSVLLNAPSEAPQIVRGASEDVRKQPYNLTIAWFRMGGNCAIPITVMEYTECSYNKSLGACPIRTQPRWNYYDSFSAVSEDNLGFLMHAPAFETAGTYLRLVKINDWTEITQFILEHRAKGSCKYALPLRIPPSACLSPQAYQQGVTVDSIGMLPRFIPENQRTVAVYS

SEQ ID NO: 118 - protein, 36 aa, human herpes simplex virus-1 (virus)
ILEHRAKGSCKYALPLRIPPSACLSPQAYQQGVTVD

SEQ ID NO: 119 - protein, 11 aa, human herpes simplex virus-1 (virus)
QPELAPEDPED

SEQ ID NO: 120 - protein, 180 aa, Porcine reproductive and respiratory syndrome virus
MSGILDRCTCTPNARVFMAEGQVYCTRCLSARSLLPLNLQVSELGVLGLFYRPEEPLRWTLPRAFPTVECSPAGACWLSAIFPIARMTSGNLNFQQRMVRVAAELYRAGQLTPAVLKALQVYERGCRWYPIVGPVPGVAVFANSLHVSDKPFPGATHVLTNLPLPQRPKPEDFCPFECAM

SEQ ID NO: 121 - protein, 203 aa, Porcine reproductive and respiratory syndrome virus
ATVYDIGHDAVMYVAERKVSWAPRGGDEVKFEAVPGELKLIANRLRTSFPPHHTVDMSKFAFTAPGCGVSMRVERQHGCLPADTVPEGNCWWSLFDLLPLEVQNKEIRHANQFGYQTKHGVSGKYLQRRLQVNGLRAVTDLNGPIVVQYFSVKESWIRHLKLAGEPSYSGFEDLLRIRVEPNTSPLADKEEKIFRFGSHKWYG

SEQ ID NO: 122 - protein, 1196 aa, Porcine reproductive and respiratory syndrome virus
AGKRARKARSCATATVAGRALSVRETRQAKEHEVAGANKAEHLKHYSPPAEGNCGWHCISAIANRMVNSKFETTLPERVRPPDDWATDEDLVNAIQILRLPAALDRNGACTSAKYVLKLEGEHWTVTVTPGMSPSLLPLECVQGCCGHKGGLGSPDAVEVSGFDPACLDRLAEVMHLPSSAIPAALAEMSGDSDRSASPVTTVWTVSQFFARHSGGNHPDQVRLGKIISLCQVIEDCCCSQNKTNRVTPEEVAAKIDLYLRGATNLEECLARLEKARPPRVIDTSFDWDVVLPGVEAATQTIKLPQVNQCRALVPVVTQKSLDNNSVPLTAFSLANYYYRAQGDEVRHRERLTAVLSKLEKVVREEYGLMPTEPGPRPTLPRGLDELKDQMEEDLLKLANAQTTSDMMAWAVEQVDLKTWVKNYPRWTPPPPPPKVQPRKTKPVKSLPERKPVPAPRRKVGSDCGSPVSLGGDVPNSWEDLAVSSPFDLPTPPEPATPSSELVIVSSPQCIFRPATPLSEPAPIPAPRGTVSRPVTPLSEPIPVPAPRRKFQQVKRLSSAAAIPPYQDEPLDLSASSQTEYEASPPAPPQSGGVLGVEGHEAEETLSEISDMSGNIKPASVSSSSSLSSVRITRPKYSAQAIIDSGGPCSGHLQEVKETCLSVMREACDATKLDDPATQEWLSRMWDRVDMLTWRNTSVYQAICTLDGRLKFLPKMILETPPPYPCEFVMMPHTPAPSVGAESDLTIGSVATEDVPRILEKIENVGEMANQGPLAFSEDKPVDDQLVNDPRISSRRPDESTSAPSAGTGGAGSFTDLPPSDGADADGGGPFRTVKRKAERLFDQLSRQVFDLVSHLPVFFSRLFYPGGGYSPGDWGFAAFTLLCLFLCYSYPAFGIAPLLGVFSGSSRRVRMGVFGCWLAFAVGLFKPVSDPVGAACEFDSPECRNILHSFELLKPWDPVRSLVVGPVGLGLAILGRLLGGARCIWHFLLRLGIVADCILAGAYVLSQGRCKKCWGSCIRTAPNEVAFNVFPFTRATRSSLIDLCDRFCAPKGMDPIFLATGWRGCWAGRSPIEQPSEKPIAFAQLDEKKITARTVVAQPYDPNQAVKCLRVLQSGGAMVAKAVPKVVKVSAVPFRAPFFPTGVKVDPDCRVVVDPDTFTAALRSGYSTTNLVLGVGDFAQLNGLKIRQISKPSGG

SEQ ID NO: 123 - protein, 230 aa, Porcine reproductive and respiratory syndrome virus
GPHLMAALHVACSMALHMLAGIYVTAVGSCGTGTNDPWCANPFAVPGYGPGSLCTSRLCISQHGLTLPLTALVAGFGIQEIALVVLIFVSIGGMAHRLSCKADMLCVLLAIASYVWVPLTWLLCVFPCWLRCFSLHPLTILWLVFFLISVNMPSGILAMVLLVSLWLLGRYTNVAGLVTPYDIHHYTSGPRGVAALATAPDGTYLAAVRRAALTGRTMLFTPSQLGSLLE

SEQ ID NO: 124 - protein, 204 aa, Porcine reproductive and respiratory syndrome virus
GAFRTRKPSLNTVNVIGSSMGSGGVFTIDGKVKCVTAAHVLTGNSARVSGVGFNQMLDFDVKGDFAIADCPNWQGAAPKTQFCTDGWTGRAYWLTSSGVEPGVIGKGFAFCFTACGDSGSPVITEAGELVGVHTGSNKQGGGIVTRPSGQFCNVAPIKLSELSEFFAGPKVPLGDVKVGSHIIKDISEVPSDLCALLAAKPELE

SEQ ID NO: 125 - protein, 170 aa, Porcine reproductive and respiratory syndrome virus
GGLSTVQLLCVFFLLWRMMGHAWTPLVAVSFFILNEVLPAVLVRSVFSFGMFVLSWLTPWSAQVLMIRLLTAALNRNRWSLAFFSLGAVTGFVADLAATQGHPLQAVMNLSTYAFLPRMMVVTSPVPVITCGVVHLLAIILYLFKYRGPHHILVGDGVFSAAFFLRYFAE

SEQ ID NO: 126 - protein, 165 aa, Porcine reproductive and respiratory syndrome virus
GKLREGVSQSCGMNHESLTGALAMRLNDEDLDFLMKWTDFKCFVSASNMRNAAGQFIEAAYAKALRVELAQLVQVDKVRGTLAKLEAFADTVAPQLSPGDIVVALGHTPVGSIFDLKVGSTKHTLQAIETRVLAGSKMTVARVVDPTPTPPPAPVPIPLPPKVLE

SEQ ID NO: 127 - protein, 111 aa, Porcine reproductive and respiratory syndrome virus
NGPNAWGDEDRLNKKKRRRMEALGIYVMGGKKYQKFWDKNSGDVFYEEVHNNTDEWECLRVGDPADFDPEKGTLCGHVTIENKAYHVYTSPSGKKFLVPVNPENGRVQWEA

SEQ ID NO: 128 - protein, 44 aa, Porcine reproductive and respiratory syndrome virus
AKLSVEQALGMMNVDGELTAKELEKLKRIIDKLQGLTKEQCLNC

SEQ ID NO: 129 - protein, 684 aa, Porcine reproductive and respiratory syndrome virus
AKLSVEQALGMMNVDGELTAKELEKLKRIIDKLQGLTKEQCLNCLAASDLTRCGRGGLVVTETAVKIVKFHNRTFTLGPVNLKVASEVELKDAVEHNQHPVARPIDGGVVLLRSAVPSLIDVLISGADASPKLLAHHGPGNTGIDGTLWDFESEATKEEVALSAQIIQACDIRRGDAPEIGLPYKLYPVRGNPERVKGVLQNTRFGDIPYKTPSDTGSPVHAAACLTPNATPVTDGRSVLATTMPPGFELYVPTIPASVLDYLDSRPDCPKQLTEHGCEDAALKDLSKYDLSTQGFVLPGVLRLVRKYLFAHVGKCPPVHRPSTYPAKNSMAGINGNRFPTKDIQSVPEIDVLCAQAVRENWQTVTPCTLKKQYCGKKKTRTILGTNNFIALAHRAVLSGVTQGFMKKAFNSPIALGKNKFKELQTPVLGRCLEADLASCDRSTPAIVRWFAANLLYELACAEEHLPSYVLNCCHDLLVTQSGAVTKRGGLSSGDPITSVSNTIYSLVIYAQHMVLSYFKSGHPHGLLFLQDQLKFEDMLKVQPLIVYSDDLVLYAESPTMPNYHWWVEHLNLMLGFQTDPKKTAITDSPSFLGCRIINGRQLVPNRDRILAALAYHMKASNVSEYYASAAAILMDSCACLEYDPEWFEELVVGIAQCARKDGYSFPGTPFFMSMWEKLRSNYE

SEQ ID NO: 130 - protein, 441 aa, Porcine reproductive and respiratory syndrome virus
GKKSRVCGYCGAPAPYATACGLDVCIYHTHFHQHCPVTIWCGHPAGSGSCSECKSPVGKGTSPLDEVLEQVPYKPPRTVIMHVEQGLTPLDPGRYQTRRGLVSVRRGIRGNEVGLPDGDYASTALLPTCKEINMVAVASNVLRSRFIIGPPGAGKTYWLLQQVQDGDVIYTPTHQTMLDMIRALGTCRFNVPAGTTLQFPVPSRTGPWVRILAGGWCPGKNSFLDEAAYCNHLDVLRLLSKTTLTCLGDFKQLHPVGFDSHCYVFDIMPQTQLKTIWRFGQNICDAIQPDYRDKLMSMVNTTRVTYVEKPVRYGQVLTPYHRDREDDAITIDSSQGATFDVVTLHLPTKDSLNRQRALVAITRARHAIFVYDPHRQLQGLFDLPAKGTPVNLAVHCDGQLIVLDRNNKECTVAQALGNGDKFRATDKRVVDSLRAICADLE

SEQ ID NO: 131 - protein, 223 aa, Porcine reproductive and respiratory syndrome virus
GSSSPLPKVAHNLGFYFSPDLTQFAKLPVELAPHWPVVSTQNNEKWPDRLVASLRPIHKYSRACIGAGYMVGPSVFLGTPGVVSYYLTKFVKGGAQVLPETVFSTGRIEVDCREYLDDREREVAASLPHGFIGDVKGTTVGGCHHVTSRYLPRVLPKESVAVVGVSSPGKAAKALCTLTDVYLPDLEAYLHPETQSKCWKMMLDFKEVRLMVWKDKTAYFQLE

SEQ ID NO: 132 - protein, 153 aa, Porcine reproductive and respiratory syndrome virus
GRYFTWYQLASYASYIRVPVNSTVYLDPCMGPALCNRRVVGSTHWGADLAVTPYDYGAKIILSSAYHGEMPPGYKILACAEFSLDDPVKYKHTWGFESDTAYLYEFTGNGEDWEDYNDAFRARQEGKIYKATATSLKFYFPPGPVIEPTLGLN

SEQ ID NO: 133 - protein, 2503 aa, Porcine reproductive and respiratory syndrome virus
MSGILDRCTCTPNARVFMAEGQVYCTRCLSARSLLPLNLQVSELGVLGLFYRPEEPLRWTLPRAFPTVECSPAGACWLSAIFPIARMTSGNLNFQQRMVRVAAELYRAGQLTPAVLKALQVYERGCRWYPIVGPVPGVAVFANSLHVSDKPFPGATHVLTNLPLPQRPKPEDFCPFECAMATVYDIGHDAVMYVAERKVSWAPRGGDEVKFEAVPGELKLIANRLRTSFPPHHTVDMSKFAFTAPGCGVSMRVERQHGCLPADTVPEGNCWWSLFDLLPLEVQNKEIRHANQFGYQTKHGVSGKYLQRRLQVNGLRAVTDLNGPIVVQYFSVKESWIRHLKLAGEPSYSGFEDLLRIRVEPNTSPLADKEEKIFRFGSHKWYGAGKRARKARSCATATVAGRALSVRETRQAKEHEVAGANKAEHLKHYSPPAEGNCGWHCISAIANRMVNSKFETTLPERVRPPDDWATDEDLVNAIQILRLPAALDRNGACTSAKYVLKLEGEHWTVTVTPGMSPSLLPLECVQGCCGHKGGLGSPDAVEVSGFDPACLDRLAEVMHLPSSAIPAALAEMSGDSDRSASPVTTVWTVSQFFARHSGGNHPDQVRLGKIISLCQVIEDCCCSQNKTNRVTPEEVAAKIDLYLRGATNLEECLARLEKARPPRVIDTSFDWDVVLPGVEAATQTIKLPQVNQCRALVPVVTQKSLDNNSVPLTAFSLANYYYRAQGDEVRHRERLTAVLSKLEKVVREEYGLMPTEPGPRPTLPRGLDELKDQMEEDLLKLANAQTTSDMMAWAVEQVDLKTWVKNYPRWTPPPPPPKVQPRKTKPVKSLPERKPVPAPRRKVGSDCGSPVSLGGDVPNSWEDLAVSSPFDLPTPPEPATPSSELVIVSSPQCIFRPATPLSEPAPIPAPRGTVSRPVTPLSEPIPVPAPRRKFQQVKRLSSAAAIPPYQDEPLDLSASSQTEYEASPPAPPQSGGVLGVEGHEAEETLSEISDMSGNIKPASVSSSSSLSSVRITRPKYSAQAIIDSGGPCSGHLQEVKETCLSVMREACDATKLDDPATQEWLSRMWDRVDMLTWRNTSVYQAICTLDGRLKFLPKMILETPPPYPCEFVMMPHTPAPSVGAESDLTIGSVATEDVPRILEKIENVGEMANQGPLAFSEDKPVDDQLVNDPRISSRRPDESTSAPSAGTGGAGSFTDLPPSDGADADGGGPFRTVKRKAERLFDQLSRQVFDLVSHLPVFFSRLFYPGGGYSPGDWGFAAFTLLCLFLCYSYPAFGIAPLLGVFSGSSRRVRMGVFGCWLAFAVGLFKPVSDPVGAACEFDSPECRNILHSFELLKPWDPVRSLVVGPVGLGLAILGRLLGGARCIWHFLLRLGIVADCILAGAYVLSQGRCKKCWGSCIRTAPNEVAFNVFPFTRATRSSLIDLCDRFCAPKGMDPIFLATGWRGCWAGRSPIEQPSEKPIAFAQLDEKKITARTVVAQPYDPNQAVKCLRVLQAGGAMVAKAVPKVVKVSAVPFRAPFFPTGVKVDPDCRVVVDPDTFTAALRSGYSTTNLVLGVGDFAQLNGLKIRQISKPSGGGPHLMAALHVACSMALHMLAGIYVTAVGSCGTGTNDPWCANPFAVPGYGPGSLCTSRLCISQHGLTLPLTALVAGFGIQEIALVVLIFVSIGGMAHRLSCKADMLCVLLAIASYVWVPLTWLLCVFPCWLRCFSLHPLTILWLVFFLISVNMPSGILAMVLLVSLWLLGRYTNVAGLVTPYDIHHYTSGPRGVAALAIAPDGTYLAAVRRAALTGRTMLFTPSQLGSLLEGAFRTRKPSLNTVNVIGSSMGSGGVFTIDGKVKCVTAAHVLTGNSARVSGVGFNQMLDFDVKGDFAIADCPNWQGAAPKTQFCTDGWTGRAYWLTSSGVEPGVIGKGFAFCFTACGDSGSPVITEAGELVGVHTGSNKQGGGIVTRPSGQFCNVAPIKLSELSEFFAGPKVPLGDVKVGSHIIKDISEVPSDLCALLAAKPELEGGLSTVQLLCVFFLLWRMMGHAWTPLVAVSFFILNEVLPAVLVRSVFSFGMFVLSWLTPWSAQVLMIRLLTAALNRNRWSLAFFSLGAVTGFVADLAATQGHPLQAVMNLSTYAFLPRMMVVTSPVPVITCGVVHLLAIILYLFKYRGPHHILVGDGVFSAAFFLRYFAEGKLREGVSQSCGMNHESLTGALAMRLNDEDLDFLMKWTNFKCFVSASNMRNAAGQFIEAAYAKALRVELAQLVQVDKVRGTLAKLEAFADTVAPQLSPGDIVVALGHTPVGSIFDLKVGSTKHTLQAIETRVLAGSKMTVARVVDPTPTPPPAPVPIPLPPKVLENGPNAWGDEDRLNKKKRRRMEALGIYVMGGKKYQKFWDKNSGDVFYEEVHNNTDEWECLRVGDPADFDPEKGTLCGHVTIENKAYHVYTSPSGKKFLVPVNPENGRVQWEAAKLSVEQALGMMNVDGELTAKELEKLKRIIDKLQGLTKEQCLNC

SEQ ID NO: 134 - protein, 1452 aa, Porcine reproductive and respiratory syndrome virus
LAASDLTRCGRGGLVVTETAVKIVKFHNRTFTLGPVNLKVASEVELKDAVEHNQHPVARPIDGGVVLLRSAVPSLIDVLISGADASPKLLAHHGPGNTGIDGTLWDFESEATKEEVALSAQIIQACDIRRGDAPEIGLPYKLYPVRGNPERVKGVLQNTRFGDIPYKTPSDTGSPVHAAACLTPTDGRSVLATTMPPGFELYVPTIPASVLDYLDSRPDCPKQLTEHGCEDAALKDLSKYDLSTQGFVLPGVLRLVRKYLFAHVGKCPPVHRPSTYPAKNSMAGINGNRFPTKDIQSVPEIDVLCAQAVRENWQTVTPCTLKKQYCGKKKTRTILGTNNFIALAHRAVLSGVTQGFMKKAFNSPIALGKNKFKELQTPVLGRCLEADLASCDRSTPAIVRWFAANLLYELACAEEHLPSYVLNCCHDLLVTQSGAVTKRGGLSSGDPITSVSNTIYSLVIYAQHMVLSYFKSGHPHGLLFLQDQLKFEDMLKVQPLIVYSDDLVLYAESPTMPNYHWWVEHLNLMLGFQTDPKKTAITDSPSFLGCRIINGRQLVPNRDRILAALAYHMKASNVSEYYASAAAILMDSCACLEYDPEWFEELVVGIAQCARKDGYSFPGTPFFMSMWEKLRSNYEGKKSRVCGYCGAPAPYATACGLDVCIYHTHFHQHCPVTIWCGHPAGSGSCSECKSPVGKGTSPLDEVLEQVPYKPPRTVIMHVEQGLTPLDPGRYQTRRGLVSVRRGIRGNEVELPDGDYASTALLPTCKEINMVAVASNVLRSRFIIGPPGAGKTYWLLQQVQDGDVIYTPTHQTMLDMIRALGTCRFNVPAGTTLQFPVPSRTGPWVRILAGGWCPGKNSFLDEAAYCNHLDVLRLLSKTTLTCLGDFKQLHPVGFDSHCYVFDIMPQTQLKTIWRFGQNICDAIQPDYRDKLMSMVNTTRVTYVEKPVRYGQVLTPYHRDREDDAITIDSSQGATFDVVTLHLPTKDSLNRQRALVAITRARHAIFVYDPHRQLQGLFDLPAKGTPVNLAVHRDGQLIVLDRNNKECTVAQALGNGDKFRATDKRVVDSLRAICADLEGSSSPLPKVAHNLGFYFSPDLTQFAKLPVELAPHWPVVTTQNNEKWPDRLVASLRPIHKYSRACIGAGYMVGPSVFLGTPGVVSYYLTKFVKGEAQVLPETVFSTGRIEVDCREYLDDREREVAASLPHAFIGDVKGTTVGGCHHVTSRYLPRVLPKESVAVVGVSSPGKAAKALCTLTDVYLPDLEAYLHPETQSKCWKMMLDFKEVRLMVWKDKTAYFQLEGRYFTWYQLASYASYIRVPVNSTVYLDPCMGPALCNRRVVGSTHWGADLAVTPYDYGAKIILSSAYHGEMPPGYKILACAEFSLDDPVKYKHTWGFESDTAYLYEFTGNGEDWEDYNDAFRARQEGKIYKATATSLKFYFPPGPVIEPTLGLN

SEQ ID NO: 135 - protein, 70 aa, Porcine reproductive and respiratory syndrome virus
MGSLWSKISQLFVDAFTEFLVSVVDIVIFLAILFGFTVAGWLLVFLLRVVCSALLRSRSAIHSPELSKVL

SEQ ID NO: 136 - protein, 256 aa, Porcine reproductive and respiratory syndrome virus
MKWGPCKAFLTKLANFLWMLSRSSWCPLLISLYFWPFCLASPSPVGWWSFASDWFAPRYSVRALPFTLSNYRRSYEAFLSQCQVDIPTWGTKHPLGMLWHHKVSTLIDEMVSRRMYRIMEKAGQAAWKQVVSEATLSRISSLDVVAHFQHLAAIEAETCKYLASRLPMLHNLRMTGSNVTIVYNSTLNQVFAIFPTPGSRPKLHDFQQWLIAVHSSIFSSVAASCTLFVVLWLRVPILRTVFGFRWLGAIFLSNSQ

SEQ ID NO: 137 - protein, 254 aa, Porcine reproductive and respiratory syndrome virus; identical to SEQ ID NO: 11

SEQ ID NO: 138 - protein, 178 aa, Porcine reproductive and respiratory syndrome virus
MASSLLFLVVGFKCLLVSQAFACKPCFSSSLADIKTNTTAAASFAVLQDISCLRHRDSASEAIRKIPQCRTAIGTPVYVTITANVTDENYLHSSDLLMLSSCLFYASEMSEKGFKVVFGNVSGIVAVCVNFTSYVQHVKEFTQRSLVVDHVRLLHFMTPETMRWATVLACLFAILLAI

SEQ ID NO: 139 - protein, 200 aa, Porcine reproductive and respiratory syndrome virus
MLEKCLTAGCCSRLLSLWCIVPFCFAVLANASNDSSSHLQLIYNLTLCELNGTDWLANKFDWAVESFVIFPVLTHIVSYGALTTSHFLDTVALVTVSTAGFVHGRYVLSSIYAVCALAALTCFVIRFAKNCMSWRYACTRYTNFLLDTKGRLYRWRSPVIIEKRGKVEVEGHLIDLKRVVLDGSVATPITRVSAEQWGRP

SEQ ID NO: 140 - protein, 51 aa, Porcine reproductive and respiratory syndrome virus
MFKYVGEMLDRGLLLAIAFFVVYRAVLFCCARQRQQRQQLPSTADLQLDAM

SEQ ID NO: 141 - protein, 174 aa, Porcine reproductive and respiratory syndrome virus
MGSSLDDFCHDSTAPQKVLLAFSITYTPVMIYALKVSRGRLLGLLHLLIFLNCAFTFGYMTFAHFQSTNKVALTMGAVVALLWGVYSAIETWKFITSRCRLCLLGRKYILAPAHHVESAAGFHPIAANDNHAFVVRRPGSTTVNGTLVPGLKSLVLGGRKAVKQGVVNLVKYAK

SEQ ID NO: 142 - protein, 123 aa, Porcine reproductive and respiratory syndrome virus
MPNNNGKQQKRKKGDGQPVNQLCQMLGKIIAQQNQSRGKGPGKKNKKKNPEKPHFPLATEDDVRHHFTPSERQLCLSSIQTAFNQGAGTCTLSDSGRISYTVEFSLPTHHTVRLIRVTASPSA

SEQ ID NO: 143 - protein, 314 aa, Porcine circovirus
MPSKKNGRSGPQPHKRWVFTLNNPSEDERKKIRELPISLFDYFIVGEEGNEEGRTPHLQGFANFVKKQTFNKVKWYLGARCHIEKAKGTDQQNKEYCSKEGNLLMECGAPRSQGQRSDLSTAVSTLLESGSLVTVAEQHPVTFVRNFRGLAELLKVSGKMQKRDWKTNVHVIVGPPGCGKSKWAANFADPETTYWKPPRNKWWDGYHGEEVVVIDDFYGWLPWDDLLRLCDRYPLTVETKGGTVPFLARSILITSNQTPLEWYSSAAVPAVEALYRRITSLVFWKNATEQSTEEGGQFVTLSPPCPEFPYEINY

SEQ ID NO: 144 - protein, 104 aa, Porcine circovirus
MVTIPPLVSRWFPVCGFRVCKISSPFAFATPRWPHNDVYIRLPITLLHFPAHFQKFSQPAEISDKRYRVLLCNGHQTPALKQGTHSGRQVTPLSLRSRSSTFHQ

SEQ ID NO: 145 - protein, 59 aa, Porcine circovirus
MTCTFVFQSRFCIFPLTFKSSASPRKFLTNVTGCCSATVTRLPLSSKVLTAVDRSLRCP

SEQ ID NO: 146 - protein, 59 aa, Porcine circovirus
MYTSLWGHLGVAKANGLLILQTRKPHTGNHLETSGGMVTMVKKWLLLMTFMAGCRGMIY

SEQ ID NO: 147 - protein, 21 aa, Porcine circovirus
MDTDHTVSVDHPTAASHKSHQ

SEQ ID NO: 148 - protein, 14 aa, Porcine circovirus
MNNKNHYEVIKKTQ

SEQ ID NO: 149 - protein, 53 aa, Porcine circovirus
MVFIIHLGFKWGVFKIKFSELYIHGYTDIVVLVVYTVFERSAEAYMVYISSSL

SEQ ID NO: 150 - protein, 159 aa, Porcine circovirus
MTFPRRRYRRRRHRPRSHLGQILRRRPWFLHPRHRYRWRRKNGIFNTRLSRTFGYTVKATTVRTPSWAVDMLRFKIDDFVPPGGGTNKISIPFEYYRIRKVKVEFWPCSPITQGDRGVGSSAVILDDNFFPKSTALTYDPYVNYSSRHTITQPFSYHSR

SEQ ID NO: 151 - protein, 35 aa, Porcine circovirus
MSTAQEGVLTVVALTVYPKVRERRVLKMPFFLLQR

SEQ ID NO: 152 - protein, 27 aa, Porcine circovirus
MASSTPASPAPSDILSRLPQSERPPGR

SEQ ID NO: 153 - protein, 19 aa, Porcine circovirus
MAAGAVSSSAVTPPWKRHS

SEQ ID NO: 154 - DNA, 1768 bp, Porcine circovirus
accagcgcacttcggcagcggcagcacctcggcagcacctcagcagcaacatgcccagcaaaaagaatggaagaagcggaccccaaccacacaaaaggtgggtgttcacgctgaataatccttccgaagacgagcgcaagaaaatacgggagcttccaatctccctttttgattattttattgttggcgaggagggtaatgaggaaggacgaacaccccacctccaggggttcgctaattttgtgaagaagcaaacatttaataaagtgaaatggtatttgggtgcccgctgccacatcgagaaagccaaaggaactgatcagcagaataaagaatattgcagtaaagaaggcaacttactgatggaatgtggagctcctagatctcaaggacaacggagtgacctgtctaccgctgtgagtaccttgcttgagagcgggagtctggtgaccgttgcagagcagcaccctgtaacgtttgtcagaaatttccgcgggctggctgaacttttgaaagtgagcgggaaaatgcagaagcgtgattggaagacgaatgtacacgtcattgtggggccacctgggtgtggcaaaagcaaatgggctgctaattttgcagacccggaaaccacatactggaaaccacctagaaacaagtggtgggatggttaccatggtgaagaagtggttgttattgatgacttttatggctggctgccgtgggatgatctactgagactgtgtgatcggtatccattgactgtagagactaaaggtggaactgtaccttttttggcccgcagtattctgattaccagcaatcagaccccgttggaatggtactcctcggctgctgtcccagctgtagaagctctctatcggaggattacttccttggtattttggaagaatgctacagaacagtccacggaggaagggggccagttcgttaccctttcccccccatgccctgaatttccatatgaaataaattactgagtcttttttatcacttcgtaatggtttttattattcatttagggtttaagtggggggtctttaagattaaattctctgaattgtacatacatggttacacggatattgtagtcctggtcgtatatactgttttcgaacgcagtgccgaggcctacatggtctacatttccagtagtttgtagtctcagccagagttgatttcttttgttattgggctggaagtaatcgattgtcgaatcaaggacaggtttgggtgtgaattaacgggagtggtaggaaaagggttgggttatggtatggcgggaggagtagtttacataggggtcataggttagggctgtgctctttgggaaaaagttatcatctagaataacagcactggatccaactcccctgtcaccctgggtgattggggagcagggccagaattcaaccttaacctttcttattctgtagtattcaaagggtatagagattttgttggtcccccctcccgggggaacaaagtcgtctattttaaatctcagcatgtctaccgcccaggagggcgttctgactgtggtagccttgacagtatatccgaaggtgcgggagaggcgggtgttgaagatgccatttttccttctccagcggtaacggtggcgggggtggaggaaccaggggcggcggcggaggatctggccaagatggctgcgggggcggtgtcttcgtctgcggtaacgcctccttggaaacgtcatagctgaaaacgaaagaagtgcgctgtaagtatt

SEQ ID NO: 155 - protein, 296 aa, Porcine circovirus
VRRESPKHRWCFTINNWTPTEWESIVECGGSIARYLIIGKEVGKSGTPHLQGYVNFKNKRRLSSVKRLPGFGRAHLEPARGSHKEASEYCKKEGDYLEIGEDSSSGTRSDLQAAARILTETSGNLTEVAEKMPAVFIRYGRGLRDFCGVMGLGKPRDFKTEVYVFIGPPGCGKTREACADAAARELQLYFKPRGPWWDGYNGEGAVILDDFYGWVPFDELLRIGDRYPLRVPVKGGFVNFVAKVLYITSNVVPEEWYSSENIRGKLEALFRRFTKVVFWGEGGVKKDMETVYPINY

SEQ ID NO: 156 - protein, 214 aa, Porcine circovirus
MRHRAIFRRRPRPRRRRRHRRRYARRRLFIRRPTAGTYYTKKYSTMNVISVGTPQNNKPWHANHFITRLNEWETAISFEYYKILKMKVTLSPVISPAQQTKTMFGHTAIDLDGAWTTNTWLQDDPYAESSTRKVMTSKKKHSRYFTPKPILAGTTSAHPGQSLFFFSRPTPWLNTYDPTVQWGALLWSIYVPEKTGMTDFYGTKEVWIRYKSVL

SEQ ID NO: 157 - protein, 2000 aa, Porcine circovirus
TAGTATTACCCGGCACCTCGGAACCCGGATCCACGGAGGTCTGTAGGGAGAAAAAGTGGTATCCCATTATGGATGCTCCGCACCGTGTGAGTGGATATACCGGGCAGTGGATGATGAAGCGGCCTCGTGTTTTGATGCCGCAGGACGGGGACTGGATAACTGAGTTTTTGTGGTGCTACGAGTGTCCTGAAGATAAGGACTTTTATTGTCATCCTATTCTAGGTCCGGAGGGAAAGCCCGAAACACAGGTGGTGTTTTACGATAAACAACTGGACCCCGACCGAGTGGGAATCTATTGTGGAGTGTGGAGGCAGTATAGCGAGATACCTTATTATCGGCAAAGAGGTTGGAAAAAGCGGTACCCCACACTTGCAAGGGTACGTGAATTTCAAGAACAAAAGGCGACTCAGCTCGGTGAAGCGCTTACCCGGATTTGGTCGGGCCCATCTGGAGCCGGCGAGGGGGAGCCACAAAGAGGCCAGCGAGTACTGCAAGAAAGAGGGGGATTACCTCGAGATTGGCGAAGATTCCTCTTCGGGTACCAGATCGGATCTTCAAGCAGCAGCTCGGATTCTGACGGAGACGTCGGGAAATCTGACTGAAGTTGCGGAGAAGATGCCTGCAGTATTTATACGCTATGGGCGGGGTTTGCGTGATTTTTGCGGGGTGATGGGGTTGGGTAAACCGCGTGATTTTAAAACTGAAGTTTATGTTTTTATTGGTCCTCCAGGATGCGGGAAAACGCGGGAAGCTTGTGCGGATGCGGCTGCGCGGGAATTGCAGTTGTATTTCAAGCCACGGGGGCCTTGGTGGGATGGTTATAATGGGGAGGGTGCTGTTATTCTGGATGATTTTTATGGGTGGGTTCCATTTGATGAATTGCTGAGAATTGGGGACAGGTACCCTCTGAGGGTTCCTGTTAAGGGTGGGTTTGTTAATTTTGTGGCTAAGGTATTATATATTACTAGTAATGTTGTACCGGAGGAGTGGTATTCATCGGAGAATATTCGTGGAAAGTTGGAGGCCTTGTTTAGGAGGTTCACTAAGGTTGTTTTTTGGGGGGAGGGGGGGGTAAAGAAAGACATGGAGACAGTGTATCCAATAAACTATTGATTTTATTTGCACTTGTGTACAATTATTGCGTTCGGGAGGGGGTATTTATTGGGTGGGTGGGTGGGCAGCCCCCTAGCCACGGCTTGTCGCCCCCACCGAAGCATGTGGGGGATGGGGTCCCCACATGCGAGGGCGTTTACCTGTGCCCGCACCCGAAGCGCAGCGGGAGCGCGCGCGAGGGGACACGGCTTGTCGCCACCGGAGGGGTCAGATTTATATTTATTTTCACTTAGAGAACGGACTTGTAACGAATCCAAACTTCTTTGGTGCCGTAGAAGTCTGTCATTCCAGTTTTTTCCGGGACATAAATGCTCCAAAGTAGTGCTCCCCATTGAACGGTGGGGTCATATGTGTTGAGCCATGGGGTGGGTCTGGAGAAAAAGAAGAGGCTTTGTCCTGGGTGAGCGCTGGTAGTTCCCGCCAGAATTGGTTTGGGGGTGAAGTAACGGCTGTGTTTTTTTTTAGAAGTCATAACTTTACGAGTGGAACTTTCCGCATAAGGGTCGTCTTGGAGCCAAGTGTTTGTGGTCCAGGCGCCGTCTAGATCTATGGCTGTGTGCCCGAACATAGTTTTTGTTTGCTGAGCTGGAGAAATTACAGGGCTGAGTGTAACTTTCATCTTTAGTATTTTGTAATATTCAAAGCTAATTGCAGTTTCCCATTCGTTTAGGCGGGTAATGAAGTGGTTGGCGTGCCAGGGCTTATTATTCTGAGGGGTTCCAACGGAAATGACGTTCATGGTGGAGTATTTCTTTGTGTAGTATGTGCCAGCTGTGGGCCTCCTAATGAATAGTCTTCTTCTGGCATAGCGCCTTCTGTGGCGTCGGCGTCTCCTTGGGCGGGGTCTTCTTCTGAATATAGCTCTGTGTCTCATTTTGGTGCCGGGC

SEQ ID NO: 158 - protein, 202 aa, Equine herpesvirus 1
MRPEGVSRGRASSVSISMCPPPPNGARRASLGCAPPLNSRPVCCAPSSVSLSSSSSRRSMPSLGSSRSSSLPSTGSLRSITRDPERLPSRPPSYTAINPECLLERGAERPRAWTASVMTAPPSYSEALCQAPPAYELVPELSYHPTQDPRGVYSSRSDPHQTSRRRQNPICIFIIVVATMLLILGLLLTITLSSLTNGKKEK

SEQ ID NO: 159 - protein, 205 aa, Equine herpesvirus 1
MDPAWRRRIHVSNPTTINVEPRPRRESLRRQLLSQLFFKKMSQLFKKKRQTRPSTVWYGRVAFPPSAWQGPARVSPYGYESDSENEEYTRISSATSSNVLTDSPTTTQDDPTGRCTDAYAESPAVLHLDDVTRNHRGAAALPSEVYLDGFCDQHKDPSGRMGPIKRRLYSKTFCRKFAAINIILLMLQILVLIGIVYRGFGKECM

SEQ ID NO: 160 - protein, 257 aa, Equine herpesvirus 1
MGACCSSRRNRSPSLAALAEETEVVLRCLAGRVVDLPGGDEVRIAPDVGRPGQNFGYFKFPGPSRFAYVKFIGRAYALGSGRKFLLYLSRNFQVFGYEDGTGLHMLAKSLHDFLKFKGLSDRDLVVVDSVALTSQLRPLTLPIRSTSDVETLVAEEATTNYTSTENLLGQTQSSTHRPLGVPLSNVKTMGVPPTKPSSQRPRGKGGRPPARLKSIREETVSGMARAREECNSPSEHDRLTSEMTDCDSDSSVSSVFF

SEQ ID NO: 161 - protein, 200 aa, Equine herpesvirus 1
MLPANRAEHSSDAEPRDIGSHGRNHGGCYSSDCKLGLLVDISNVVSPLPLDLTWSSWETTSQPARSRSYLNTRTYTIRACCDLQTRLHAFFIGVFEKRDPEKQILLPDLTNFKCILNNPRIMQELATEHSVCSAPFSAATQYDCDEDGEESTINGLCFHCHCKTPFSLECWQAANSAQAKILSVARGITSAKERQRENKR

SEQ ID NO: 162 - protein, 470 aa, Equine herpesvirus 1
MALSSVSSCEPMEDEMSIMGSDTEDNFTGGDTCAEATRGLVNKSAFVPTQTVGTVSALRNVVGDPPKSVVVSFSASPQRAQPSNPKSERPAFGHGRRNRRRPFRRNNWKQQQRGWEKPEPENVPARQSAGSWPKRSSLPVHMRLGQRGGDSSSADSGHGGAGPSDRWRFKTRTQSVARVHRNRRRGNANHGSNTPGRSAGDRLNAAAASSIADVCRRVTSSRIGEMFHGARETLTTPVKNGGFRAENSSPWAPVLGFGSDQFNPEARRITWDTLVEHGVNLYKLFEVRSHAAEAARSLRDAVMRGENLLEALASADETLSWCKMIVTKNLPMRTRDPIISSSVALLDNLRLKLEPFMRCYLSSSGSPTLAELCDHQRLSDVACVPTFMFVMLARIARAVGSGAETVSRDALGPDGRVLADYVPGACLAGTLEAIDAHKRRCKADTCSLVSAYTLVPVYLHGKYFYCNQIF

SEQ ID NO: 163 - protein, 343 aa, Equine herpesvirus 1
MLLGGRTAYLSVLGLITAYAAFTIWYTLTAQLHNPCVYATVSIDSKDGIAAKWEVYNSTIVYAYPENGAKRFSDGLSGFDYVCRENWVNESKLDVLKNMKELHDKVRIVVGTRNCRAYLWSVQLQMITGAWLIYIAFLCLRQERRLLGPFRNQNEFLSPTGYTFNYATYTLATTVLKTHYTKFALLLCEASLRRVALSRTFKRDPIGFLCEHSAALALIGLEVGTHFVARLLVVGTVTLVHTPCSQIYPIYLKLASWGFVVAVTIVEIVAIIYEKPPKTGSSANPPTPATHGVKGLCTSCCSTVLANLCGKLVYLLLVIGAVSILLHYEQRIQIGLLGESFSS

SEQ ID NO: 164 - protein, 1081 aa, Equine herpesvirus 1
MAQRNPEPTIRVLYATDSCVITYSLMLLTGQESSEGVYAISYDWSSELDDLFGRQPRAPNTDAGDGWSSTEQSDADQLATALLQRKPSVSFCLLSGMVGGASDEPQDRVRPMFVCVFSTWTGARALAMTLSHGHPLSSNTLLQALTEEATFLLHNDLILALAITTENVTARSGRTAAAAKYDPQRGSVKAAVIGHSTGRSGLTSVYIHHENKVLTAFRRLYCNNNTTPFWFASKFGPGEREIVLATRYYLFQAIRCSRSGGTYDLQAVKDFIRTYNVPAAPNPTGLDLTHLTSFSLLSKFCCQSWYSRGPCALALPRYVDLRIQADVAEVSALEGFIAADRQGLRVSDREFITYIYLAHFESFNRKQLYDHLLAVSIADPGDIDRITSTSSLKRGTIEKFFAQVRIQLNIRDYIAHNVNPRVVCLPASIGSQYAQDKTYTPSSTTMSTGSAPLGVCDTSTPILKLLDRVESSLAGRGWIQTIVSPNKPQSVHSTPPLDQSRGDELSPGVSSQCGISRRLLHIASSPPVNGRALPLEVLFGQKGVPGPAPVYRVALPSKRQAFAVIANDRWETTTQNLARPGGSKQAYEGGFALAGFGEIDDCSLAWRDLQLTRTTSGVCRTALASSNASAQMYINRNEIFNSSLAVSNIILDVDFGIKRRVPLGMLHLAMRGFRAGIITTLSLIFSDATVQWDSYPCYFYKTSCPPQLVRALHRGEPSSFPDYVDGVEECYMESDFIDDYAAMEEYTDGPMDDYEMMMVDNECPQAACDNTPPNKEGGKTPLQRLDDTDACECTEKMGFRVTVPVPPPYLLAGPEALRGLARIIQQAVVLERTFTESMCSVLRDFSFIDTGVYSHGRSLRLPFFCKVGDSGEVYGGLYPFYVIPPKCNDVDEFVAQHSNPANFHFHAAPRHPTITHVITDLGGDYVSFFERKVARNREAIMTKRATLESLLSSANVSIKSHEAVEAFVVDVVLGEVVSHLATHFPDQSGEYQTVGVHTVVTKPDWILMQINRSGNAYRSQGFSCLRAKHLRSARGLARTFLSISADVHGRLCASISQQCFATKCGNNKMCTIFTLEVDRAK

SEQ ID NO: 165 - protein, 245 aa, Equine herpesvirus 1
MFKWLMSSLCGIRNSTSPEVYEPIIGGQNPATMLRLQSALAAVNALLPATLTIEDVISSADNTRRLVKAQTLARTYQACQHNIECLSRHRASSDNPNLNAVVTTHMINAKRLSDTCLAALMHLYLSVGAVDATTDTMVDHAIRMTAENSVVMADVAVLEKTLGLDPQATVRAQDLLALNSGVLNSVNAVAEMTDPTDDVEFTQSVHSPLLPRQLSTTEVVGVPSPVKSNLKSKHKPKRKASLVAV

SEQ ID NO: 166 - protein, 326 aa, Equine herpesvirus 1
MASVTNLVDSIVVVECGERWRARAEAAGRLLVLINNHTVELSGEHGSAGEFYSVLTDVGVRVACSSGYAIVLTQISGLLPVEPEPGNFSNVTFPENSAKYYTAYGIVDSGYRGVVKAVQFAPGINTSVPPGQMSLGLVLVKLARKSIHVTSIGSTRDGRTSEANLFYDYFAPKRVEDAGYDISAPEDATIDPDESHFVDLPIVFANSNPAVTPCIFGRSSMNRRGLIVLPTRWVAGRTCCFFILNVNKYPVSITKGQRVAQLLLTEDIDDALIPPTVNYDNPFPTYSPSESTKAPQSPVLWKFTTDFDREAPSSLRADGGFGSTGL

SEQ ID NO: 167 - protein, 100 aa, Equine herpesvirus 1
MLSTRFVTLAILACLLVVLGLARGAGGDPGVKQRIDVAREEERRDFWHAACSGHGFPITTPSTAAILFYVSLLAVGVAVACQAYRAVLRIVTLEMLQHLH

SEQ ID NO: 168 - protein, 304 aa, Equine herpesvirus 1
MSDTWRRRRSGCNDANATEELVYSTVRSDHRQRRPSRGTFVMRENDLYDKQSVSKENDLYESASPNDDKVYTRRGMSTAAHYRDSEHIYETCEGDEFYDACEYSLIGGGKLSTSNGRQSPAKAQPPPRGAAAAPPPRVPTRPPTRAAATSTTPRQQDCAPKQRASPGVNSIKSGKGLAFSGTPKTPKSQWYGATHLFNKNVFCAAVSRVAAAHASDAASALWDLNPPKTNEDLDRFLKAAAIRILVCEGAQLLEVANSTMESTPDGYAAAGPNGYDRRPRTASRRRSLKCKPPADDFFDDTNSG

SEQ ID NO: 169 - protein, 479 aa, Equine herpesvirus 1
MCLLHISLPYLSCALLPGWYFDARPAASIVMFAAAEENDDPYPGKSGYNDTCELMDMDGAVASFDEGMLSAIESVYSIPTKKRLALPPPKAASPGALYQRLQGELGFPEGQTLLSAMEKWNEDMFSALPGHVDLYTEIALLSTSVDEVVRAGLDSLPTPSHYSPEVDLNAHGDEPFPEVPALEDDLEIYVISAQRFYLSELRTREEHYARLLRGYCVALLHYLYGSAKRQLRGSGSDASLMHKFKQVVRDRYYREAANLARLLYLHLYVSVTREVSWRLHASQVINQGVFVSLHYFWAQRRKFECLFHPVLFNHGVVILENDPLEFHDLQRINYRRRELGLPLIRAGLIEEENSPLEAEPLFSGKLPRTIGFLTHQIRTKMEAYSDAHPATPLFPLAEHSYSKRIGGRLSYGTTTEAMMDPPSPSAVLPGDPVPPLTVGVRQTAATLAIPSNLTLQSMETDGLDYSSMTGDELNQMFDI

SEQ ID NO: 170 - protein, 871 aa, Equine herpesvirus 1
MDQHHGARGGAPIRRPRRSIESRSHPFRATGNTQRTYSTPRLSYRDGLSGRTASRDPQEQASNQDESSNPSTSNAQQSTSFWGYLRRVFSDDVPAQPQAPRPRADFAPPAGEESSSEEEEEEGPAQAPLDEEDQLMYADQYSVGDSSDENDEEEDPRLGSDYPTSAESSEYHDHGEMVAGAGAESESETDIDAEEEEEDDEDDEDDMEVIRDESYRLPRTWLDKSIRLMDEALAQSSELSKAITKSTRSLYDSQFAPGGRGYTQTATPSRRLVQLSRAGMYDSDKIVMTGDYMEVDDDPDSAYQSWVRAIRHPLAMNPSWEETISNHTNPSFSTDIDYDIDELIEKNLARTPPVFEGLLDSAEFFYKLPMLYTYATITQDEAYEERLAWSNTQALHGHEQSSWQALLVYYSRGGMYVSPTQEPRGIWRRALKQAMALQLKMCVLGLSDVVTKQNATHHHAAVTFLVDALLRTARNCYLASRLLVFAWERRRETGAKRPAEPLIALSGVTLLQPLPPEVSELLEQRTFDIGLRTPNSAVFRAFFGSLVYWAELRLALRDPASINCRYVGFHLQTSEIYLLARAHSASPGYTKEELVAMEAILTLATLMLEVALQWVHVACAQLLSENDTIKAFRRVSASIPHALAPLGSIRLHDAEFEVLSNPDVMVARDETALSQALFLGYFSVRTALTACMRDYSHEADGGSKETVTGVFLGVGLILQRLAGHLNFLLNCLAGAALYGGQKINIHSLTLPRYSLLADVMAPMLQRQSLVDFWRARDNMLEDLEITPRPGPPTQGKRVVVEMPLPSDDLPDMTPGASVNNGAGLGRMVDMAKQLQHYRETIIGEEATSSVGKRGLIRAGVGVAALRGRRRK

SEQ ID NO: 171 - protein, 747 aa, Equine herpesvirus 1
MDGGGSSSWTHVSKNLIERRAVKGCLLPTPSDVMDAAVMALKDVTENIVGQQLFSVDRTNALSVIHTNEVPESIIATAIARDTSRDYLREYEGAAKCNLAATDLSHDEMWEVVIKRYWRYLRESSGAEVVDRGAVGQATQSVLSVLLLQSTFGKKRLSKNPFKHKGPNVGYKSNLEDLRSAFTKIEKYMYYMRPNDPMTKSEDTELRLHELLAYVTTCYRWLLWFMDLTDAKVLRNIDKGPVITHGPRESRPPDELVRRHLKSGPAISAGTGVALTLSTATADALIVLLRMSVSWTSHSWKSNTHGVTGAIVAAVELVTLIHHHLQYIINTVFAGYVCWLDGGVENSYLNSALRSQGRFDHFVGKLVPIMATLSWANMEKGTVMWFKYALAKSIVCHGSPTQHYLTVLESIASKRTGACPPQGSTFGRNPSGFPGQFCCPPQGPLPAPPNSKTRGTFRRCRPGSLRSSRQLPTSPPSNIVSPRTNPAIEGSTAAKNVQGAETIQVRSSGEFNDCIWYINGAYPHQRSDSSSSDNSTCSSTETQYITLPSTPSPTGDVVYTNPLLGPDEEVDASPQPVDPMSDYSAPKNPDYMRPRSTLVEEVWQLRDSDYTPYMRPSRAGRSRVRVEDQTLEPSSPAGCNPPANSPENDSDDAAVDSPPISPEVVYGTFRPRAKCVYDQYGLTALAALSASRAKARRTRPGPTQPDVCRERDEESAEPRHDGFIRRTMSTTGPPRKHPDQTERVSSL

SEQ ID NO: 172 - protein, 219 aa, Equine herpesvirus 1
MEDYKLLQLETATVDAQAPPLPTKTVPVFAPPLSTPPQPNELVYTKRRRTKRKAKCRCLFFTMGMFALGVLMTTAILVSTFILTVPIGALRTAPCPAETFGLGDECVRPVLLNASSNTRNISGVGAVCEEYSEMAASNGTAGLIMSLLDCLNVGDSESVMNKLNLDDTQLAYCNVPSFAECYTKGFGVCYAARPLSPLGELIYKARQALRLDHIIPFPR

SEQ ID NO: 173 - protein, 468 aa, Equine herpesvirus 1
MWLPNLVRFVAVAYLICAGAILTYASGASASSSQSTPATPTHTTPNLTTAHGAGSDNTTNANGTESTHSHETTITCTKSLISVPYYKSVDMNCTTSVGVNYSEYRLEIYLNQRTPFSGTPPGDEENYINHNATKDQTLLLFSTAERKKSRRGGQLGVIPDRLPKRQLFNLPLHTEGGTKFPLTIKSVDWRTAGIYVWSLYAKNGTLVNSTSVTVSTYNAPLLDLSVHPSLKGENYRATCVVASYFPHSSVKLRWYKNAREVDFTKYVTNASSVWVDGLITRISTVSIPVDPEEEYTPSLRCSIDWYRDEVSFARIAKAGTPSVFVAPTVSVSVEDGDAVCTAKCVPSTGVFVSWSVNDHLPGVPSQDMTTGVCPSHSGLVNMQSRRPLSEENGEREYSCIIEGYPDGLPMFSDTVVYDASPIVEDRPVLTSIIAVTCGAAALALVVLITAVCFYCSKPSQAPYKKSDF

SEQ ID NO: 174 - protein, 401 aa, Equine herpesvirus 1
MMYQPDREPGEDSCLVLSSSSVQRCTGSQRGCMPCTWAASKAFVGIGLQACVLTSSILHIDLLTRNSTCLILMIISMYVLSLIRVPISKMETIVTVCRSIQALATLVAASVWVAGSAVKKEHLLIVVTVCILFVFIAGTQISLFYVICSANGTGTHFRASLLAIIGGCVLGVSVKLVELKDVPIGIGIAIAIIASCQDFGLALRDTCHYRIGRYACMRTFTDLGRGINYRWVTDVEAVPKIEEVAEEKVSLFKFFKEMPGVIFSPAVGTHATPIIWIVLRLVYGISNVWQTPAYVVFCLTVGHVSAMLLEQLVIRVNYTAEASSGIHSTAHAVCMVLAAFGYGVAAPLSLAFTVSGGILGALYLRKRATGARRLAATHISRWLIVCVYVAAGLCYATIITH

SEQ ID NO: 175 - protein, 405 aa, Equine herpesvirus 1
MALPRAMRPGGSHPNNFLFNTLPVIDNPVERQRAMAVFERESLRDAFEMLTPIAPSLKNAFLIFNEDGLLIHTSVGGEQVYIPIQTNNMESYSWKKAPPAVFLANVDGRRGLLDAFKAKTQTNVSKVVFEIENYSPSRILTQTVFSARDQTEEDTEMGSDAEGATQTVSSRLVKHEFNNYALMLPTRQPDVSMSLSKAQLNKILGVCKQAGDPITFQCLFDDTLQVRSGDRQVVFSVDYQHADNCGVESSSSLLEKMPMKTKKSAPEPIRGISGRRLFTLVLDEDTNFKQLIQKLKLKNAGAVLNFFLDPDSIPMIGLSTKQPFSVMMFFMCSYPTQPCQVGFSPAAFSSTPMGAGVKRRASEEEESDQPPKKLFPDGKLFKSNFVLLMDKTGAKIPCPEQPMHF

SEQ ID NO: 176 - protein, 497 aa, Equine herpesvirus 1
MGLFGLLKYAYSNRLVKHDAITTPPGIMTPIAIDLWNVMYTLMEKFDQERNFPLDGAAVTARCFFSLLRLLLKRSYYPIFVSDRGIYGDGRVKQGAKAIVSQTMSSYGGSGRLSSACFTGDEHDTEFQEDPEENDVSVPPQDTCPPTEISAGYVEPERKCEHSSTRWSALDGAPRLSYRLCVNLIRHLGYPYVNACNLEADDVCANLYHTNTVAQIYTTDTDLILMGCDIILDIMPLFPPTLRCCDVLMDLGVTYDEFLTEFVRCHTDLHEPQTLASVQSVISSLHSPPDEDEGADMPQTPSGHSWRCPNERRVISWRRQDDHDYDSSTEDSDQSDSSEEEEECPAGKGFGYRENPAVETCKRRTRPRRSAEASGRILHLKYTSRYPPIMESAPRALVRMAPPKTRHEVLERKFVKHVVSMLTPERRGSLSIMRRLPITQEPSNFSLVHDTLKNLVSEHEIARELANMFWNHIPTPTDYNTVLVNYWDDCGHRRQWS

SEQ ID NO: 177 - protein, 321 aa, Equine herpesvirus 1
MSIENSKEAALTAELSLAGAFFYTPECPDIEHLRSLSVANRWLDTDLPISDDLKDVAKLTPAEREFYRFLFAFLSAADDLVNLNLGDLSALFTQKDILHYYIEQESIEVTHSRVYSAIQLMLFGNDAAARARYVASIIGDAAIGRKVAWLQAKVRECGSVAEKYILMILIEGLFFASSFASIAYLRTHNLFVVTCQSNDLISRDEAIHTRASCCIYNNYLGGFEKPEPKRIYELFSEAVNIECEFLLSHAPQYSHLLDIGAIISYVRYSADRLLGEIGLSPLFNAPKPSPSFPLAFMTVEKHTNFFERRSTAYSGTLINDL

SEQ ID NO: 178 - protein, 790 aa, Equine herpesvirus 1
MALNFLQSDCPLAIIQDVISRVDAISDYGYANELSTTLPPRPSRSQVLEYITRVVDTLKPRCRVDERLYVVCGELVHLRIRTRNVEDLKYWLNSTEIALNEIVEKDILDHLDFIQRTLHAFESSEYRELCALGLQSALKYEEMYLAKMRGGRIESMGQFFLRLATTATHYTMEEPAMARVLVSGEVGWTYIFKAYFTALAGQVLIPATPIMLFGGRDCGSLASCYLLNPRVTDMNSAMLALMEEAGPILCNRGGIGLSLQRFNTPPKEGCSRGVMALLKLIDSMTMAINSDGERPTGVCVYFEPWHADIRAILNMRGMLARDETVRCDNIFACMWTPDLFFDRYQRYLDGESGVMWTLFDDTASHLCHMYGKEFEEEYERLEQCGFGVDSIPIQDMAFIIVRSAVMTGSPFLMFKDACNKHYHFDLRRKGAIMGSNLCTEIIQHADETQNGVCNLASINLPKCLAIPPPHTAGVPYFDFAALGRAAATATIFVNSMMRAGTYPTVKSQRGVDENRSLGLGIQGLHTAFLMLDLDMASPEARQLNKQIAERLLLNSMKASATLCRLGMKPFKGFEDSKYSLGELPFDSYPGVTLANRNAWRRLRTEIKQHGLYNSQFVAYMPTVSSSQVTESSEGFSPVYTNLFSKVTATGEVLRPNLLLMRTIRSIFPRECARLQALSTLEMAQWSVVGAFGDLPVGHPLSKFKTAFEYDQRTLIDMCADRAPFVDQSQSMSLFITEPADGKLPASKIMSLLVHAYKRGLKTGMYYCKIKKATNNGVFVGGDLVCTSCSL

SEQ ID NO: 179 - protein, 465 aa, Equine herpesvirus 1
MNLGGNRFVQIGNGMSNIMYTDANGAVRWEQISPPAGFPQQQRGRGRGHVAFGLPNTLDWLPGFVQATPNSITISNMGGIQISSAGVITAAINSEQNSWMLSSFNPSLKLTRQVTLTDFCDPTAERPGLPIIRLRHHLDAIGSSPSSTPPGRNPQELDEAWAALSELSVSGRSDTTGLRPSLLSLTFLVASRSGEYSDKAAAEAVRAHVLANYRDRRTEQRLDRFGEYLQAMVRTHVFPHKHMTVFGGLISHVIQDKLASLTAVAGGVQEGARTNNSAVPRSSVYVPACAFLDVDHELKLGDASAKFVYLIFVYSQRLRREGVRVYVAVSKFDEVAFEDAVSFLFHKARTESAIRGTEGADAPEPHPNAALPLQELSSSRCEPRCPPSRLNNREFTNALYQWAPDLRGRPNRTSCMYAAYIRLGAIASDSPRTTRRSERFGSVDMPVVWLENVRWDPQDWVECSY

SEQ ID NO: 180 - protein, 1020 aa, Equine herpesvirus 1
MAREHGSMRALVNSLAGLLGETDTEVPSLEPAMLMVLKSSISEFFLSTDTVSVDEAAELFPRLQFLACRAYAASHTPDAAMLAENLAGLVLWRIHQNWTDREMEAVDQMFVLLEIMNGESGVYMLSNNNLRISAKYGPSNMHLIVSTWLDTFRNVMSVAAKSTPDSLFNSKRMESIEEFSKPLVHAKFNLIYDMPFVQEGLRIVAKKINWILPFGLMVKGYKDMSMAPLTRALFLLSLVDSYFPKGTATEGSMKALTAYFRELVRTIDNSAFVPITEVNATPRTAYEVRVSSAIVHQNPYVTDTKAGMVAERVRTDAEILTSGALLSSGALSAHATAVAKLLSSNEPDDVSSRARARVAEHASNTWETIQASTTPTQVVEALVTAGFTSTHCGILERVVVDYFTRLRSTANSGPGRNDSLDYAQQVVGCVAIVGGVVFRLLLSYGFGLDYIRDYTTTISTLEPVYNELLSALGLADKGVEQTLKRSMAPRPYMNYISAARAALDDELLIVEKRTTGPGTHSAARESLLTWFDFRARDRWGVRIPDRDTTSTQVLAPITASLYSDDDLIAAASKLSFDALDAPPTQIIDDPSFAPYMLATVVLDAFNAILTSRFSADSVSQALRVLSWARDYGAGSIANVDGYRTKLTAIIASVSPFLQKDAPTPTMAHANNLEALLGELHSVVVAAIALIPERARMPVPERPSVKTSTFLAGLFLTAVYKRLETLVGHTAELTNNILGTASGIVSSIVTLNRFFNCRIMPVMGHYAVLIYPQSAQSAPFGRWRLVDVVDAVGSIYNEVSDLRADLRADVVTLKGDITSAAEALQECEALAVKTEGTRFGKLFNSLLTRHTQLARAQRGLAIRAGKLLGGSEAPGLKHVNTFLQRWGAISVMYQKATSGSTPEVNITSLANTLRHVWDEVQQERKATPPSRKFSNRDLGLAVERLMGGYPEVLDDDSNSTALTPKFNVDSWNSVNMDALRKRVTMPANIDSIRGNDSLATREYLKKEDLLAEIDAIFNNTK

SEQ ID NO: 181 - protein, 3421 aa, Equine herpesvirus 1
MAQTLVPANKAGGAQADVVVIGYRNQYDSQLGEGSHVSCLRSSLSFLRLIFTHGIDFALTADSIDGVLVEGRAWTVAGSKSGEAPCMVSIVELPNKITYANSANALCCVFSRLYGDSGFYMHPGDGFQSTQIPARQFFDGVWKSRSESFALITIGAIGLAVYRHGDVAYVFDPHGHGSVTEAFVVRVLARDVYAYLTGYAATDPESDWAGALVFFVTCGPTESEPGFLISATSLLYGISETYLSDEQYVERSVATSHPGISTPPPLTDVAVGAVSEAWQYQELENGAATLDADMEGVAPAAAQVRASVIRQPTEKRVSLPKRRRPPWTPPTSSENLTTSGNTHTVAGRPSQKVRNATANVQNPTTGNGSAWAEALNDGGVDNASRPGQAVGAAGTLQNPAPGDALAMETTQASEEALRTRRVFRLSGEDEAPYDLGDAVGVLSAEINELATRAEELDVLSSTCVDSTVWVTRPHNSPDMDILEQFITMIFNRLLSFLVENGARTRTDSPSVIAGLFPGVLAAIPTQSAVVNLLQATGMALSDVASYKSILNMVSNEDSPVGELAVIKLELVASEVIKSTQKLVARVEELERDVTSGSVNPLGLYTYLTERLVAEMTKHGGDLFAREPKPGAVSLTERIGSLFRKARTREARATRTNASLARDLNAIEAAVHAAHDKFDAIEIKPADPSDTTNMDELAKSLDLSAVPTRVAKVIKKVESMVSDSIREYFLRGVQYSARAIAMDKTSGARFQVASAAVSNLERMLDSLPNFEKSLNSVVASAGIQGPPPAQISGSRKATLLGNLLRAGQNLTTDNALGAWAALLSEAHTEGHIERRELEAVIKEITSINDHAAKKASVEADMERFRVLSAAVDQATSDMYNSNPHALDTIIRGAEEMIRQAKVVEAHFDSGRISREAASRVGVRKREVETLANSARQRAAEISAARDEIYSRLQSLLLPLAGFVGLRAAPGVLEQLAKDAQRSTSEELRNLMHEAPKQVVSTVHSHLWSLFGQFREALEHPNSTTSSALAGVGPAFAIVVRSLLDPNKQRESVEFFITHADALADTVGAVEANPNSELAVAHAVNSIAAAIQTVSVGGRTITEFAFLVPMLERYQSRLTIVRETQRLATAQRAVAASVSAAAEVTTKLRAVAVPGVQEDVLKAAIAAAKHVSSEVTAAATAAERELARLDSKALSVAQVARAHQDLQKQTAVAKQRVGEIEEVLANLNKQQRELQDRAVHDRWKSDLLAALDKIETKSSFDVSELSRLRDLGAARGYDSREFAKRAEQALAANARAVIAVLDNVFKFNPYAPVNSKKETNPTISMLYNISWWDDFTLAAPILNTLFAGVDVEELMSLMRISTGMITFASTNGGRPKYNEAVNSLSSDMLKVPQLAKYVDFYGKWYTEFNAEMDVLSKLRADVLQAVGVRSGEISRALEEVTYVRNAEVAEKVLADGVKLYIPSDALIAKAVKYLEEFNQKRFAGSAFEEAIATTIRQDLSTAREAATQAEAARSEAMHRATHILREVVEAAKAADRDASANLANLKNLLRLTPPPQSVAAALDKATSSDDIVTQAALLLGTVESTPELDIKAVEWLQQARSIIDSHPLTTKIDGKGPMDPYAERIEKLHTLRGELDELRRQLTATEVSWDEAWGNFSRAVPRADVSMDGFVDAHQRARTLQASMGVISEMRADNKYGRLPPKVIGAIESKFAERHKNLETFNDTSTVLQTAITQFDSLVQQIPPEMEYDVLRSLLASFDQLAAVLPKWVGAEYAAYRSLLLMRIGLYDEYQKIAGIAAAGSRPHLEAVEYRSAVEDANLRRASRVSSLMGDKDVILSLREAKSSIDTAFPQVLLDAKGVPVEYRVCYRAVGDKLAAMLCGKLGVSMRPAMPSDPIVESSSVSGINVTHDILQLRFGLEKAYHSGFSTFARFVRHKRADWSPTEPAQAAAEIYAAVLATTLTREYGATWHRIRFMASSGLFVASPDSVCDTQGGRGKKSNNIVHLTLSDVVLSAMLRNSMHLVNFMRLDLTRQHEYMARTITPVLTKSLLSDILINTLVPTDTSTQWRSLPLAGDLEDLAQGMLFSIRMSDWKQNSFSTTSLLDVWMRSPGESGRAAAAKIASAIPGNPLATFTVLARMCIPPNALASLWEALQPEAFSQQNLSYDDVVTSRLDIASTVQTSVAVDPEMKSVDTKSRKQLYTTTGTSTTFTLAGSAPSAVKEVSALDVATCALMFGAPVVIAMETPEMFSEASGMSFCLKIFDSRPGATDHEIIQAVSSDLSSWGTSLLALDPNAIENACLTTQLEILSGLVASKLLAPAPPCLIVLDPSMRVIKVLWESESPPNDLVITLAEDEIIAELPYLNADDDLLPPMNPDDPIYTRVISGTNIPTATTEGSLFADQQLEFLRPESNPFPFASHDSSQSLDVPSSPSSGSDKYEEDPTGIVYDAPVDDMSDMAMNKAKAWQEWLEDGFAEDDYRELSNAMPAPPKTTPVVESKQKSDSVDRAPTLPPKAAPLPPSDASAIMSGKPVFKYTPGNKSAVPPSVPAPPTLPPAPPLPQSTSKAASGPPPTLPPAPPLPQSTSKAASGPPPTLPPAPPLPQSTSKAASGPPPTLPPAPPLPQSTSKAASGATQSDSGKTLTLDVPKTQSKDKVVPVPPTDKPSTTTPAALKQSDASKPPTAAIQHQQKLGTPVTPKDSGDKPTDNASAPVGVSPVTPDGTPGAKPPPKDAPPVDDTKQPVRKSLPSQVRGGRPYIRPSLGPFKFTGPPGYTIPVHGLPPSDSNVTQSTKEPPKPAVETPAAAPAKSAAAPAAAPAKSAAAPAAAPAKSAAAPAAAPAKSAAAPAAAPAKSAAAPAAAPAKDQTKSAAEVPKPAKDQAKDQAKDQAKDQAKDQAKDQAKSTTGQKLAKDPKSDGLTDDVALEIVPEKTPLPDDSPIGAVPENTPLPDDSPIGSPDLSASKNSHTTDAVSSDRFSVACKVPLPDSPEDDFYSYAVDVPLPDSPTDDPSSGRSDARAPTVGGVASIHRKSDSRNNRQSDAWRRAFADTLHGRPRNRSATKPCKSAPYKVPHAISYTKIPSVPNDQSGLAGKPCSEEPKRPTGRDTPVGSWNVSPSQAPADIPTAIPQNQNTSESPRTTSLKSPTRTVQSSMPADDIDELAEYDLQIARAVPVTKHPQPPPANQTPPPQEPPAPIDDRKNIRPPLSEEEIIAFLINMDDDDAGNASGPVDLHSVQAPKLPKQSKPTTNQFVPLDWWTETEPVVDADSLDLSPKQQRLFSWESTRDLLNINVRDRVYEEESDDEYTVSWDQHLVPAVSPTSVSSYSSDTVTDSYTDINDPRSVVCPLDGNAQNNVREFLDTHSSRVRVVPADELLSRRYFRSTSLSAMALLIAACRTIVRRLRATRRVLTDINRSLLLDLKQIRVLLG

SEQ ID NO: 182 - protein, 119 aa, Equine herpesvirus 1
MAADKQQQQAPVAFNPADPPNIKAANFKDMLPVDVITILNQNIDELDYTKYTEDEISEGLKQLFMGTARTMVSLRQRHLKSLVRRSDMFAQNDASTWARPNIGLKRTFPPRFMQPISED

SEQ ID NO: 183 - protein, 275 aa, Equine herpesvirus 1
MDSYNYRDFAVGGGLLQRIRLVVSGSLHCGESDATLNDPKHLPARCVFQFSGPDNNSVTFPIEYVLRLMKNWARSQCDPYIRIQNTGVSVLFQGFFFAPPNAPMASITSEHNNVILKSTHTTGLALSGIERVKRGGGLDLRPLQAMMQISCFTRMPVVQLSFRFMGPEDASRTQRLLERATSFGAMELHQKRTVDSCDRSNGIVSPREHRECRERQKRRPTPKRCASEVFASLASISSAFASERVKRRPVRIAAAILAFVFVAVILAIATKGRLF

SEQ ID NO: 184 - protein, 162 aa, Equine herpesvirus 1
MYGRSNAPGCQPPVRAHPPSSPMTSRLQLAAMEQNASDAALSGMQQARSRQASPKRLRDLIPSSDVESMSLNALDDAYGHHDFSVWFEDLMPPEMELLMPTTDAKLNYLSFTRRLASSVFHSPDNRMPGGACDHTSALDARKERFATIINKFLDLHQILHDA

SEQ ID NO: 185 - protein, 620 aa, Equine herpesvirus 1
MAASCNLDVIGEDGGCALTGGWQPGAFERPYMGFDARLLSTNSSLCSELIFSAHLMQISPTPQPREQVDVCEDPDNDPPEPSCAQFVDAVADSLALDKLCLICRTIDLYRRQFGLSPQWIADYAMLCTKTLAAPPCAVATVVAAFEFVYLMDKHYLRRGKTTLVGAFARRVLTLVDIQRHFFLHVCFRTDGGVPRCAASGTAPAATAMAGLGMADKVQYSNYSFLVQSSTRAMLLTVADVPSGDDGALQAVPHGRHGAGRPADGGGGVFGPKQQSTVAALMSWKECAKMIDCSGSERRRPGATMTCCERARADDDEYERQLLSTENTYLGSADNQAEGGNDTHLKWGYADLTLLLLSQSSTWEASEKTSLASQSRRACVEEYWASHRTVLARDTAPRFARFVDADAVPDTATGPVLATTLKHVRSRGRTCAECVLCNLILTREHWLALRRFKRDVISYSSNNANLFDCISPVLSALSDANSEPLAGDCGVGGGGTCPEDSGRFLELMHAAGTEAIYKHLFCDPMCALVELQTNPSVLFSPIGPPPEPDEIELQKARLASENWFSGRVCAGLWALAFTFKTYQIFTPKPTACAAFIKDAGLLLRRHNLPLISLEHTLCNYV

SEQ ID NO: 186 - protein, 326 aa, Equine herpesvirus 1
MFDGRSDIYDSTSFAAELDDLYSCRSTGRENGRRSRVSTRGVHRDRCGSAAKRRSTKRRCELVARERDRYSLYLDYMASHPSDEISAVRELVVPLIKTTSITLPFDLNQTVADNCLSLSGMGYYLGIGGCCPTCTVSGEPRLHRADRAALILAYVQQLNNIYEYRGFLASVLAAAAQGDQAGVAASEGVQAERLLENVLAQPELFFAYHVLRDGGIQNVRVLFYRDLSVSGYMMYAVFPTKSVHLHYRLIDRLLAACPGYKIIAHVWQTAFVLVVRRDEGQQTDMDIPTVSAGDIYCKMCDLSFDGELLLEYKKLYAVFDDFLPPV

SEQ ID NO: 187 - protein, 1220 aa, Equine herpesvirus 1
MAAREQANSVRRSGFFNPFIGKRPFFRPGSGQTAETERPRPPQHSYCTEVGSFKFIAPRCLDEEAPADQRRGVHVGTLERPPKVYCDGSEYDVLNFASGGCWPRRIRVWNGQDFRGDGFNPRFERFHVYDIVETSESASHDDPSRFAELSRPSGSVVTLLGMSECGKRVAVHVYGVRHYFYMAKAEVDSACGITTEAELVRAMVDCAHSSALSAALGNGNGGKQSGGSGGGWWGGKHVSADCFKVETVCHTTLYYFGSKPALYYRVSASSSRLGGFICDNFHPEITKFEGSVDVTTRLLLDNENFTSFGWYRLRPGTHGERVQLRPVERHVTSSDVEINCTPDNLEPIPDEAAWPDYKLMCFDIECKAGTGNEMAFPVATNQEDLVIQISCLLYSLATQNHEHTLLFSLGSCDISEEYSFACVQRGEPRPTVLEFDSEYELLVAFLTFLKQYSPEFATGYNIVNFDWAYIVNKVTSVYNIKLDGYGKFNKGGLFKVWDIATNHFQKKSKVKINGLISLDMYSVATEKLKLPSYKLDAVVGDVLGEHKIDLPYKEIPSYYAGGPDRRGVIGEYCIQDSRLVGKLFFKYLPHLELSAVAKLARITLTRVIFDGQQIRVYTCLLKLARERNFILPDNRRRFDSQADAASETSELAMDSQSHAFDSTDEPDGVDGTPDAAGSGATSENGGGKPGVGRAVGYQGAKVLDPVSGFHVDPVVVFDFASLYPSIIQAHNLCFTTLALDEVDLAGLQPSVDYSTFEVGDQKLFFVHAHIRESLLGILLRDWLAMRKAVRARIPTSTPEEAVLLDKQQSAIKVICNSVYGFTGVANGLLPCLRIAATVTTIGRDMLLKTRDYVHSRWATRELLEDNFPGAIGFRNHKPYSVRVIYGDTDSVFIKFVGLTYEGVSELGDAMSRQISADLFRAPIKLECEKTFQRLLLITKKKYIGVINGGKMLMKGVDLVRKNNCSFINLYARHLVDLLLYDEDVATAAAEVTDVPPAEWVGRPLPSGFDKFGRVLVEAYNRITAPNLDVREFVMTAELSRSPESYTNKRLPHLTVYFKLAMRNEELPSVKERIPYVIVAQTEAAEREAGVVNSMRGTAQNPVVTKTARPQPKRKLLVSDLAEDPTYVSENDVPLNTDYYFSHLLGTISVTFKALFGNDVRTTENLLKRFIPETPHKTPTKTQALLERAGFEKLTPFTPEEESRRILHTVFCTLEAAPHQS

SEQ ID NO: 188 - protein, 1209 aa, Equine herpesvirus 1
MESAPKTVSLPVSPLGYVYARQKASLQTGTVSLTAARSVDSDLAVLPVIRGLTVEQTFTTNVAVVAGSKTTGLGGTGITLKLTPSHFNPNAFVFYGGSVIGASSNAPNLTRACEAARRRFGFSAFSSPPVENAVETSGEEICASLNLSPETTALYLVVTESFKEMVYVCNTFLHYGGTSTVTIDGQDAMKIPIYPVQLYMPDVNRLASEPFNAKHRSIGDEFVYSRPFFNSDLCRLLHGYVLGPAAVALRVRNLDGVARGAAHLALDENHEGSVLPQDVTFTLFDSTQGNAGKGSGRAQRQGDGSGSKNSASSGIERRLASVMAADTALSVDSIMGAGIYDTELPSVEDWPVLSSGDDTESLEALGAYAARLSGLVGAMVFSANSVLYMTEVDDGGPADGKDGSNPSYHRFYLIAAPYVAGNPQTDKDGRVLPHTADQQAAPINGSNQEFSLDYLALACGFCPQILARLLFYLERCDAGTFGGRNETDALRYLANTLESDVPCGLCNQATRPACAHTTLHRLRQRLPRFGAPVRAPIGIFGTMNSAYSDCDVLGNYASYGALKRPNDNEAPKSIMQDTYRATMERLVNELEQAKLIDKETLAQASPCSAPTSVVHDQASFIGLLSNIKDTIEGAAEQFMRTLVEARDFKIREGLADANHTMSISLDPYSSSFCPVTSFLARRTVFAVLQDLVLSQCHCLFYGQSVEGRNFRNQFQPVLRRRFLDMLNGGFITAKTVTVTVSDSGVLAPDLTRPASEPPTKDYDGDMARVSMEVLRDLRVKNRVLFSNGGANMSEAARARVAGMASAYRRPDKGSNILNGAVGFLVKQYHGVLFPRGHPPGIDTPNPQWFWTLLQRNQMPARLLSKEDIETITAIKRFSDEYSAINFINLTPNNIGELAQFYFANLVLKYCDHSQYFINGLTAIVVGSRRPRDPAAVLAWIDRTINGAADVEPAAQEVLQRLGSNPAAWTGTFTSTNMVRYVMDQRPMVVIGLSISKYNGSAGNNRVFQAGNWNGLNGGKNVCPLMAFDRTRRFVLACPRVGFTCEAGGFGTGVRENTLSEQVRGIVSEGGPMVQTAVFAAVLHALGARTQHLAVDDWIGLVDDEFLAASLDALNATVVDQFGEWSVEAAQELVKNMEAQTTAGAVAAGEGAFDFGACVGDTPQQSTSAFNGGLAMAAAPAGQKRSLPDDILFDMGAPPEKKSGLTFDML

SEQ ID NO: 189 - protein, 775 aa, Equine herpesvirus 1
MEQDDAPAAMGSAQARQRLLAIFGQVQAYIFQVEMLKRCDPSALLPLVGSLKLNALTIRMLRRKLGGALIEQAQHQQTPLACALTMALEYAEVEGERVLRAVDDVNLAGPEGFFRATMRLDEPCEYHVRVHLDTYGGPIDAEVQFLHDAENFLKQLNYCHLITGFEAGLDALESVARFLTRTVGSGIVVPPELCDPTHPCSVCFEELCVTANQGEAVHRRLLECTCDHITRQMAVRVANIDIARHLPHALSVASERRAAAEAALRALEARRVQGHNGKSAGTEDPTQQVASRLLESHHVFKPASRCLYAVSELKFWLASTKHGDMGQPRAIDTFTENLETLDKQEKFFHLQAATVELALFGRTLDHFDRLFADQLLGLDVIDGMLVGSCAVSPDDHIEALIKACYTHHMSAPLLQRLTDPDTSNREALKQLLGRIGVDTDDGAGELGDALDVDLDNLGGAPPVNSTPCGEDALCRTVSEERPWDKLLERATADASQRRRMYAERLSKRSIASLGRCVREQRRELEKTLRVNVYGEVLLHTYVSSYNGFCARRGFCAAVSRAGTIIDNRSSTSAFDSHQFMKAALLRHPIDQSLMPSITHKFFELINGPVFDNAGHNFAQPPNTALYYSVENVGLLPHLKEELARFMITAAKGDWSISEFQRFYCFEGVTGVTATQRLAWKYIGELILAAAVFSSVFHCGEVRLLRADRTYPDSSGAQRCVSGIYITYEASCPLVAVLSAAPHGAIGAETVVIYDSDVFSLLYAVLQQLAPGSGAN

SEQ ID NO: 190 - protein, 980 aa, Equine herpesvirus 1
MSSGCRSVGGSTWGNWRGDGGDLRQRRVLSPVCSAPAAGSWIGSQLGNVGNLLATPHPLGKPASSRVGTIVLACLLLFGSCVVRAVPTTPSPPTSTPTSMSTHSHGTVDPTLLPTETPDPLRLAVRESGILAEDGDFYTCPPPTGSTVVRIEPPRTCPKFDLGRNFTEGIAVIFKENIAPYKFRANVYYKDIVVTRVWKGYSHTSLSDRYNDRVPVSVEEIFGLIDSKGKCSSKAEYLRDNIMHHAYHDDEDEVELDLVPSKFATPGARAWQTTNDTTSYVGWMPWRHYTSTSVNCIVEEVEARSVYPYDSFALSTGDIVYASPFYGLRAAARIEHNSYAQERFRQVEGYRPRDLDSKLQAEEPVTKNFITTPHVTVSWNWTEKKVEACTLTKWKEVDELVRDEFRGSYRFTIRSISSTFISNTTQFKLESAPLTECVSKEAKEAIDSIYKKQYESTHVFSGDVEYYLARGGFLIAFRPMLSNELARLYLNELVRSNRTYDLKNLLNPNANNNNNTTRRRRSLLSVPEPQPTQDGVHREQILHRLHKRAVEATAGTDSSNVTAKQLELIKTTSSIEFAMLQFAYDHIQSHVNEMLSRIATAWCTLQNKERTLWNEMVKINPSAIVSATLDERVAARVLGDVIAITHCAKIEGNVYLQNSMRSMDSNTCYSRPPVTFTITKNANNRGSIEGQLGEENEIFTERKLIEPCALNQKRYFKFGKEYVYYENYTFVRKVPPTEIEVISTYVELNLTLLEDREFLPLEVYTRAELEDTGLLDYSEIQRRNQLHALRFYDIDSVVNVDNTAVIMQGIASFFKGLGKVGEAVGTLVLGAAGAVVSTVSGIASFLNNPFGGLAIGLLVIAGLVAAFFAYRYVMQIRSNPMKALYPITTKALKNKAKTSYGQNEEDDGSDFDEAKLEEAREMIKYMSMVSALEKQEKKAIKKNSGVGLIASNVSKLALRRRGPKYTRLQQNDTMENEKMV

SEQ ID NO: 191 - protein, 160 aa, Equine herpesvirus 1
MDSPRGISTATGDAHAEAAVSPAAEIQIKTEAPDVDGPEATTECLDHTYTQQTSGGDGLDAIDTDDLLEMVLTSENTESEPGIPFALRGNFICCRDDNCRACRELPFRPSVIGFSRDPHVSMALDMTSGNWAYVPRVFPDTPTAPWMANYCIPDLDEHAD

SEQ ID NO: 192 - protein, 646 aa, Equine herpesvirus 1
MDAYTVDGNAVSLPIYVAGYIALYDMGDGGELTLTRETVAAALPPASRLPINIDHRNGCVVGEVLSIVDDARGPFFLGIINCPQLGAVLATAAGPDFFGELSEGLSEQERLLYLVSNYLPSASLSSRRLGPDEEPDETLFAHVSLCVIGRRVGTIVTYDATPENAVAPFKRLSPSSREELLITAREAQSRLGDAATWHLSEDTLTRVLLSTAVNNMLLRNRWNLVARRRREAGIEGHTYLQASASFGITNGCNKADFCGAELVDTCGYKSGEKVHGAPYSRVTLGAKAFTSSSPNALPSSDNDKGGIGERTQKHISAMASSNPQTLSAAGAPLVSGDYILVPAAQYNQLVVGQHTSHPPINAGPAPVTHAVPSQYIPPAYNSLMPPSMYQAPPYWSVPHSANLEAQITALVGALAADRKATKGSDPHVIQGSQCSPPLSPQQERRYARKRRHDWDATTRDDLEGIYYPGERSPRPGERRAGRPSTTIADLMGAVSSLQQEVSQLRAIQTVTAQPQAAPAGLYKPIPAVPPQYSQYQYIQPQHAVSAIVAPQLPGIPSQPTQAVLAPQVPAGEAPGSAKVVAASTAPQQAEQARAAPQQFEAVTSAAVLPVTQPQASSQTVDASASTGLEFGRDDADIFVSQMMSAR

SEQ ID NO: 193 - protein, 329 aa, Equine herpesvirus 1
MASSNPQTLSAAGAPLVSGDYILVPAAQYNQLVVGQHTSHPPINAGPAPVTHAVPSQYIPPAYNSLMPPSMYQAPPYWSVPHSANLEAQITALVGALAADRKATKGSDPHVIQGSQCSPPLSPQQERRYARKRRHDWDATTRDDLEGIYYPGERSPRPGERRAGRPSTTIADLMGAVSSLQQEVSQLRAIQTVTAQPQAAPAGLYKPIPAVPPQYSQYQYIQPQHAVSAIVAPQLPGIPSQPTQAVLAPQVPAGEAPGSAKVVAASTAPQQAEQARAAPQQFEAVTSAAVLPVTQPQASSQTVDASASTGLEFGRDDADIFVSQMMSAR

SEQ ID NO: 194 - protein, 587 aa, Equine herpesvirus 1
MAEYVNYVLGSLYVSDTATSTIPTDVRNFIAPPFPLNFWSGPTFTVSSNTRADPLKLVAARHRAAAAAIDTLEAQSQYGVANVDALIRPLERQVAKVADALAALEDAARAAESADAATPQVNASEADQRPDNIGQSLSEIQIAKNDVPMEFDTNLAVDLLATVFVSRAAGGSNGVVFGTWYRALQDRLVTERPVATRSIDYRDGRMSKTFMTTAVVSLQSCGRLYIGNRPYSAFEAAVLCLHLAHRAVNSNYTYPTSFSGLIEQLPVYIEAFSTALGDGTLGKVGYEFNGARLPKNQFHVPGGGGRYERGALNGHGVLETLIRLKVLPAIPGSLGTTSTAVGPELDADQTAYIDDVNKAAAAFLVRAQNLFLTEDQTLLRSTINTITALLLLRRLLWNGNVYTDRLRNNFQLGAIVPNLAVSQRDARGASGGDAAAMVSRSGNNNFTFLCERYVSPIYIANREVELTQLFPGLAALCLDAQTVARDQPQHRAVNVSTGRNQTNLTRLIGIELENRRRTAPVPINEVLAAHDAVALQYERGLGLLMQKPRLRASLEETRRLGQFNVASDYDLLYFVCLGYIPSLTSAM

SEQ ID NO: 195 - protein, 272 aa, Equine herpesvirus 1
MKRRQRLTARSRLRAGIRCHNRFYNAMVQDLASAKRNGVYGERLAPLFSELVPAETLKTALGVSLAFEVNLGQRRPDCVCTVQFGKGSDAKGVCILIELKTCRFSKNMNTASKNLQRKGGMRQLHDSCRLLARTLPPGSGEIVLAPVLVFVAQRGMRVLRVTRLSPQVVYSNAAVLSCTISRLAEYAPPVSAKSTRRRCVAKGTKAKAFSTKAAAEPVPSITPAQPSAAAAVVSLFPAAVPANTTNAAAVHQPVAVSHVNPLAWAASLFSPK

SEQ ID NO: 196 - protein, 352 aa, Equine herpesvirus 1
MAARVPSGEARRSASGAPVRRQVTIVRIYLDGVYGIGKSTTGRVMASAASGGSPTLYFPEPMAYWRTLFEADVISGIYDTQNRKQQGDLAADDAASITAHYQSRFTTPYLILHDHTFGLFGGDSLQRGTRPDLTVVFDRHPVASAVCFPAARYLIGDMSMCALIAMVATLPREPQGGNIVVTTLNVDEHVRRLRTRARIGEQIDMKLIATLRNVYSMLANTSNFLRSGRVWRDGWGELPLSCETYKHRATQMDAFQERESPELSDTLFAMFKTPELLDDRGVILEVHAWALDALMLKLRNLSVFCADLSGTPRQCAATVESLIPLMSSTLSDSESASSLERAARTFNAEMGV

SEQ ID NO: 197 - protein, 848 aa, Equine herpesvirus 1
MLQPYRKMLIFAVVTVAFAMAVWSTPVPATPSGVGNATWANNSFNITRYDKITMGQVYSNTSNSPIFFVVISERNFRIVNTPLGASVFWIPKGAMNPPQHQPCVANGPEPGDPRGPCVNSTVSLLFNENVEPFLMSKNLLEFEVLPDTYITGWTFERSKTATTKSNPVGVVLSPPRGSPSANTTIRDDGGPKKPLSIIDEYTTLVADLQNFTMTLTYISPFAAVWPIEAFQTGITVMGCDTTQVVAYLGHGFMGLQISSVNNPPLEMIVVPNDVSARILNRRPSRLRLEPPGPHAGPIYKVYVLSDGNFYLGHGMSRISREVAAYPEESLDYRYHLSLANLDTLAMLAELSSGKSTDVSYYMYRIVARLAVATFSLAEVIRLSDYMLLQEAIDVDMNLRLIVPLVMKYAAGGAADSSYTSSDVAMDQFDVAQSQIEKIVSDINVEAELRKPMYEHRSLLRSVYAYSRKPLPNAVALADRLILAMYKEAIKDRITWNSTMREVLFFAVGAAAGSHVILTDEPEPGAPAHKDASLFLSLNRNILLLCTAMCTASHAVSAGLKLEEVMAGLVAGGVQFSLLEVFSPCMASTRFDLAEEEHVLDLLSVIPPRLYTDLNTGFEDDGTTIHSYGRSANGILNSRIAYNFDAVSVFTPELASCSTKLPKVLVVLPIFTNRSYVITRTAPSIGLTYSLDGVNIAKPIVISYITYGNCEVSRATIKSGYLDNPGHTQTCVYCGSVFMRYMVSGAIMDLIYIDDKEVELQLVAGENSTIPAFNPKLYTPSMNALLMFPNGTVTLMSAFASYSSFKVPSTYLWASIGGLLLAILILYIIIKMLCGGVTNDGYKLLLSYE

SEQ ID NO: 198 - protein, 530 aa, Equine herpesvirus 1
MDFKYSDTVIHNGVVFYITDGGHRVYFLYGGCLLSVPRPHATAESGEIAKFGLTLRGLTHNDRVVANYVRSELNRTGRHESAPSSEEDVFVDRLEVLAQGAQAFGRDICGSFDLEVYDPYLAECMVSLKVTSGLIVSTGRDIPQDGMLHLYTVPTITNASSGFIYTPNIACFTLVQAYLTELPPELETLISGLFDRIPVARPPLRDESGGHSRTDIIVTSPRAVKTMAIGGTTRCSKRPLRKTVVSDFVQVRLIPKPCSIWDSASRVASGASLQSLQLLFKIADEIILIEEPWPGLDEHLNQARSTIVDAILAVYGNEGKLRFFGGKLTQQGVTTLQRFVLCQFILGKWNLINCYAALEQLAESYIGAVPEARDPLPDPHLVADAVNEIIRESGILGELCEIIVRYTQPTDPVNGSGSEVVELEARLLAEFAANATRVELGLSSYDEVRNMEARIASVLNKLYAKDGIGGAAQVACRILGSGLPVAIVLNVSSITAFDGLDLSRKGAYYLYYLLSERLKRGGVTVHVSRK

SEQ ID NO: 199 - protein, 239 aa, Equine herpesvirus 1
MPQVLMGNTRLHAPLEDGIPLIENDENSSQNEVDLYDYVSMSSYGGDNDFLISSAGGNITPENRPSFSAHVVLFAISALVIKPVCCFIFLNHYVITGSYDFAVAGGVCTVLYYMRLALTAWFMFRNIQSDMLPLNVWQQFVIGCMALGRTVAFMVVSYTTLFIRSELFFSMLAPNAGREYITPIIAHKLMPLISVRSAVCLVIISTAVYAADAICDTIGFTLPRMWMCILMRSSSVKRS

SEQ ID NO: 200 - protein, 1376 aa, Equine herpesvirus 1
MDRRSEAFKIPVPEVIPAGQILSTIEVSSHRTLFDFFKQIRSDDNGLYAAQFDVLLGTYCNTLTLVRFLELGLSVSCVCTKFPELNYVNDGTIQFEVQQPMIARDGPHPVDQPTHTYMMKHIEQRSLSAAFAIAAEALGLIGGTTLDGTQISSSLRVRAIQQLARNVQTVLDSFERGTADQLLRVLLEKAPPLTLLAPLQIYRDEGRLASRVNRAVLVSELKRRVIEDTFFLTKHERNRKELVVARLAELVNCTAPSVAVTRMTHSDTKGRPVDGVVVTTAGVRQRLLQGILTLEDMAADVPVTYGEMMITGTNLVTALVMGKAVRNLDDVAHHLLGMQRDQVRANEKLIKDYEDVPSTARVRADLVLVGDRLVFLEALEKRVYQATNVPYPLVGNLDLTFIIPLGIFKPATDRYSRHAGSFTPTPGQPDPRTYPPQTVYFFNKDGNLVQLSFDSAAGTVCHSSFLDVDSVLVAIRREPHELHCAFGAYVTLPPAGTLLDQMRRFFERWHMLMPARPRWTAEALMTIDQLLSPGNANLRLELHPAFDFFVAPADVVIPGPFDMPNVMPTVMAMPRLINGNIPLPLCPVEFRDSRGFELSVDRHRLNPATVLAVRGAFRDANYPMVFYILEAVIHGSERTFCALARLIIQCIVSYWRNTHQVAFVNNFYMIMYINAYLGNGELPEECTAIYRDLLEHVQALRRLVAEYTVPGEAVGGQGHDALNNVLLDPALLPPLIWDCDPILHRADMGRARAQELWVDGVDYAAIPWVEMAEVNFGNTGGHLVHNRPIRGENKRNPIVPHHDPEWSVLSKIYYYAVVPAFSRGNCCTMGVRYDRVYPLVQTVVIPDLGAEEIAPTSPSDPRHPLNPRHLVPNTLNILFHNARVAVDTDALLLLQEVVTNMAERTTPVLATAAPDAGTATAVTQEMRTFDGTLHHGILMMAYQRNDETLLEGTFFYPAPVNALFACPEHLGALPGLNAEVLEAARDVPPVPHFFGGNYYATVRQPVAQHAVQSRADENTLTYALMAGYFKLGPIALSHQFATGFHPGFAFTVVRQDRFLTENILFAEKASESYFMGQLQVNRHEAVGGVNFVLTQPRANVDLGVGFTAAYAAAALRTPVTDMGNLPQNLYLTRGTIPMLDGDADAYLRRVVNTGNRLGPQGPRPIFGQLMPATPAGVAHGQAAVCEFIVTPVSADLNYFRRPCNPRGRSAGPVYACDGEADAVDVMYDHTQGDPAYPSRATVNPWASQRNSYGDRLYNGKYNLNGASPVYSPCFKFFTPTEVEAKGRNMTQLIADVGASVAPSTSNTEIQFKRPHGSTDLVEDPCSLFQEAYPLLSSTDTALLRTPHIGEIGADEGHFAQYLIRDESPLKGCFPRI

SEQ ID NO: 201 - protein, 314 aa, Equine herpesvirus 1
MASAAFEIDILLPSDLSPADLSALQKCEGKLVFLTALRRRVMLSSVTLSSYYVNGAPPDTLSLMAAFRRRFPAIIQRVLPNKMIAAALGVAPLPPGAFIQNTGPFDLCNGDSVCALPPILDVEDKLRLGSVGEEILFPLTVPLAQARELIARLVARAVQALTPNAQAQRGAEVMFYNGRKYNVTPDLRHRDAVNGVARSLVLNMIFAMNEGSLVLLSLIPNLLTLGTQDGFVNAIIQMGSATREVGQLVHQQPVPQPQDGARRFCVYDALMSWISVASRLGDVVGGKPLVRICTFEGQATISRGEKAPVIQTLL

SEQ ID NO: 202 - protein, 734 aa, Equine herpesvirus 1
MFGRVLGRETVQYFEALRREVQARRGAKNRAAEAQNGGEDDAKTAFLNFAIPTPQRHQTVVPGVGTLHDCCETAQIFASVARRLLFRSLSKWQSGEARERLDPASVEAYVDPKVRQALKTISFVEYSDDEARSCRNAYYSIMNTFDALRSSDAFHQVASFVARFSRLVDTSFNGADLDGDGQQASKRARVDVPTYGKQRGTLELFQKMILMHATYFIAAVILGDHADRIGAFLKMVFNTPEFSDATIRHFRQRATVFLVPRRHGKTWFLVPLIALALATFKGIKIGYTAHIRKATEPVFDEIGARLRQWFGNSPVDHVKGENISFSFPDGSKSTIVFASSHNTNGIRGQDFNLLFVDEANFIRPEAVQTIIGFLNQTNCKIIFVSSTNTGKASTSFLYNLKGAADDLLNVVTYICDEHMERVKAHTNATACSCYILNKPVFITMDGAMRNTAELFLPDSFMQEIIGGGNVSGAHRDEPVFTKTAQDRFLLYRPSTVANQDIMSSDLYVYVDPAFTTNAMASGTGVAVVGRYRSNWVVFGMEHFFLSALTGSSAELIARCVAQCLAQVFAIHKRPFDSVRVAVEGNSSQDAAVAIATNIQLELNTLRRADVVPMPGAVLFYHCTPHGSSVAYPFFLLQKQKTGAFDHFIKAFNSGSVLASQELVSNTVRLQTDPVEYLLTQMKNLTEVVTGTSETRVFTGKRNGASDDMLVALVMAVYLSSLPPTSDAFSSLPAQ

SEQ ID NO: 203 - protein, 706 aa, Equine herpesvirus 1
MDAHIANETKHLLVHGNSKTRALVHIIVPDACLKKAGVDPVKLSDRHRASPSAAPVFRVFAQTRYHATGECSLWRTVFAGYVPSGAIVSALVPTVPADHPRLFQSTPDSGGLFVSLEIECDADGRFDAFTLVALRVDIADDPRTTEVLFTYDELLPPGTRYGADSKRVALLCRQFVAYVNSHPTVSQSAVTAASHIEAAVAEDVKSASGPQVSYGARIDPAEYLFSGGGFDNHQALARLEDDDKEIMSLIRRASEVIAKRNPVRVLSNPEVNGDAHRRQCVASGLRQGARGAHASDSHARVGFNSSIHDATALLLGLEPPDSGRFVNSGPQRHLPPQGPRSPASRDCQSGMLDDVLLLTPENSNPLTPLDWLDVGHAAVAGGDTPRDVWRRRPISLVARKHYGTCETFVVVSYENSTAWGGRRARDEHLAGSINPPVMQACVAAGVDHPRNLPPETRGELIAKFPMLTVPLGDTPPPVAAFDAAAELALIDHFRGACVSALLKAISERLRAEPRMSQLIEYDIPNNNRDCIISVAQRAPELLEAVALAIQNVTVTEFCNSALMLSALSHLNILSGNKRGRLPYHRSWLPSLAGGADAFLFDYYSSGGEVVKVSPVPLAILVTATRTGQHSCRFARGAPDSSSKTYERYLPGECYAYICVGLNRSFEALVVLPGGFACRASAARKLAWPAHLVEPILERYCWTIPSH

SEQ ID NO: 204 - protein, 370 aa, Equine herpesvirus 1
MMAAASDSCLSLWEGSASSPNRQLTPEAVNCLTEALTEDVAVLRLIRSDPRVKIFMAVSVLTPRLARFAPPPPKLTHTAKCAVIMIYLTRPKALALQPKQFHMLVTFNKASVYSLVVRVKTKPFPVGTQRFRAVFQDPEFIGLPSDIPDPAAENIPTEINDRLDVSNFATPAQPPKDKYDCCVLAPGVWWSNANKAIYFLQMDVALLALCPAGWKARGLGIILGRLLNHQEGCATCRFTEHSDPLNATADSVATPESCLCWAPCLWRKAHQRELTVEGDRYLFRVLFMDAVERVRLTGLRRSPKITANLADLVVGIGPHGQQIPVNNAGWKLVALDADISRLIVCGCYALRYICPPTNSKHQPSSPDEYA

SEQ ID NO: 205 - protein, 317 aa, Equine herpesvirus 1
MSFSARSRRQRLQLEEAYQREMIFKMHTLDLVREGVNKRSPAFVRAFTSAKEASLDLDRYMQAHSRVGRVEQNARALAQRVEAQAAVGEILDRHRRFLHPDFIDNFDSREDSIVEREERLGDVLSDINCDGGGGEVGDPQEWLGHEDEALLMRWMLEEAPRVSTRIAADPHSPRSTCPAPRKAPEDARCGARKPGEVNNYTPSAQPRSQETTVDHLASPDEGTRLGDRTRDLEHHSTAPMRTHPNVLASERRRLGVVHQREKSSESQESATRSKAIVGQEDQKWLGGIPPLSDEELQVDMGIPTMNGPIYPDYHRTA

SEQ ID NO: 206 - protein, 594 aa, Equine herpesvirus 1
MARSRRRSSVDEMDVGGSATSEYENCGGPSFSPLNLSRPKKSTRGRSLRSAQAWGGKQLHPERSTPLARNDCGPSSKPRRRHEVGRSNKGLGASLDRTDEDTSQCPRIRASAIRCGASTRKIVRITGECDAQQGDSRPGRSEMAGWHSPPKRRRTPSRHGNSDNERSHLPRLSSHGVVRVGGRPLTQTPLQKTIILQPKLVRKVFMPTFTVNPEMHYRRVALGEIPKFGGAGSYGEVQIFKQTGLAIKTASSRSCFEHELAVSLLTGECSLRAQASLGIGGIICLMAFSLPSKQMVFPAYDADLNAYGYRLSRSGPPSVLVTESIERAFIGLGRALVYLNTSCGLTHLDVKGGNIFVNHSHFVISDCVIGDLSLMTLNTNSMAMRAEFEIDTGEEEIKTLRLPRSASQMTFSFVIGHGLNQPISVIADFINNSGLAKSTGPIKHDVGLTIDLYALGQALLELLLVGCISPCLSVPILRTATYYYYSNKLSVDYALDLLAYRCSLYPALFPTTPLTTIYGIPWDQVEGVFESIAGAHHREAFRAHLERYRLTHRRLFASIRIPSAFTGVLELVSLLCHANEKARLSIPLLWTPRP

SEQ ID NO: 207 - protein, 565 aa, Equine herpesvirus 1
MDSSPVTYSGEPPYKLRRLSPSYPYVSKLRERCASKIETLSEGSARDSLEEEDVSEAMATGAFLATRLYLPSVLPQRITTLTFLDHFKKSRPLPNSDKRLNPIFYRLAYIRDLVGEMELEGIVERGTASRLLGASSPAGFVAGTYTHARDLSKTMSLASVRDAVLAIEAQTRDQSESQLWALLRRGLATASTMKWGALGPQYHPQWCEVSTNAKGIPNNPALQFGQTNERTARSLISALYVARSEAATPDLLVDPGCGQCFVFDESASVPGDAYACGLLMDARTGVVGASLDMLVCDRDPSGVLSPHSTQTTLDFFEIKCRAKYLFDPDLFSPVATAYANLLKHRTAVCLRKFLRSIKNPAVEYFAPTSVPGATEALITCNSSWKPREVNETNRRCGDFDRDHIALNLDASSDVWLFSEPDLESETITPARWDTGELALSVPVFANPRHPNFKQILVQAYVLSGHFPDHQLRPFLVTFIGRHRKRCEEGKTFTICDRPEGSPYNLNEVVHSSCAIPILLFVTPVIVDREGCWEDIEIESLTAFNKTADAIWDSDSPADVSEPTSS

SEQ ID NO: 208 - protein, 74 aa, Equine herpesvirus 1
MGQRLSCGCFRTDQLVTHSGEVVSLNADTFEEFSMEEFDIPPPPPLPKPVFKQPGPYKIPARSQRCPSKRRDPY

SEQ ID NO: 209 - protein, 450 aa, Equine herpesvirus 1
MARRGAAVAEEPLLPSSGIVGIGPIEGINWRTWLVQVFCFALTTSVLFITLVTASLPQTGYPCFYGSLVDYTQKNHSVVDGVWMRQIAGGVAPTLFLETTSLVAFLYYTTLVLVAISFYLIISAVLVRRYARGKECTAVAGCTRPTTTLIASHVTLVLGTLATWLLQVVILLLSHKQAVLGAAVYVVHFVSLVFFCMSFSGLGTASAQYSSNLRILKTNLPALHKMAGPGRAVMTNLGMGMLGISLPILSLMLGIILANSFHITLWQTVTVAVGVFVALGLMFLIIVELIVSHYVHVLVGPALAVLVASSTLAVATHSYFVHFHAMVSVQAPNLATASKAIVGIMAVISIIMLVVRLVRAIMFHKKRNTEFYGRVKTVSSKARRYANKVRGPRRNPQPLNVAESRGMLLAEDSETDAEEPIYDVVSEEFETEYYDDPQRVPERSHRREYR

SEQ ID NO: 210 - protein, 887 aa, Equine herpesvirus 1
MPSIGPIPTIPDEGSRGSSATAAPRRAMASYRDTTLGGRAEGVAFSAVEDSYTSSVSLARMLYGGDLEEWVRHTRPGVSLEIQSRAPVRFPPPNNPSSRRVTVVRAPMGSGKTTALLKWLGEALDAPDISALVVSCRRSFTRTLAKRFNDAELPGFATYFTSTDYTMAGEPFRRLLVQIESLHRVDDNLLNNYDILVLDEVMSTIGQLYSPTMVHLNKVDALLTRLLKTCPRVIAMDATANAQLVDFLASARGERSVHVIINSFAAPGFSQRDGTLLRTLGTDVLRAALGFVLVDDENGTKVMETDSRPISARLREVNSAGFFGRLMDRLVAGRNVCVFSSTVSFSEIVARFCSQFTDSILVLNSLRPSEDVAFWGGVRVLIYTTVVTVGLSFDTAHFHSMFAYVKPMSHGPDMVSVYQSLGRVRELIHNELLVYVDSSGARAEPIFTPMLLNHVVSRQGGWPAEFSQVTDALCCQFKARCGPAYRTASTRGLALFVRFKYKHFFERCTLASVGDSINILYTLLESNQMRVAIEGCQFPLTAAGFCDFLQDLRLDAYAARKEIKQLRGPGGIAATPTEVFENDDVAVFIQKYLRPGVAHDEILALLVELNSPIVREQFVNVAVLGACLRLPAALESPEVFAGVYKHYASGVVPVISDAGALESVSITPDVNVLARWDLYKSCTRHARDLAWDPSRGGSGLDMSEDFITNTLSADYNRFQSLLVEIAKCNVTPLEMLAAGAVRGVTTALSGRPKSRVPLSKGEHAVSLFKVLWEDVFGAKLAKSTQTFPGGVRVKNLRKDEIVALLESVNVNHSECKTHRELYALLMCNRKLFAGPRYKLRAPKWSRNLCFLELDNTGTCKTPLDAALADLAPSAWPQVYGAVDFDAL

SEQ ID NO: 211 - protein, 716 aa, Equine herpesvirus 1
MLCRRGSDYTAEFCHVPVSGELLKRGARDASLVTPARVASAAQTAAVPGCWPLAPLGNAMLWKSVYGGITAALKRAVGSFAFYQPLVLGINTQTGLLVTLRPAASAGEGGGDHVSPRAAIVNVSVEVDLDPAGIEASAASSTGSSLARARLCTLRDGYFLSKRDIALEVEIATKEVSFYRKYDSVQQPANKRRGDMADLFVVHERTLLLGGCKRMGVKVLLPRTFDCLVASSQSVSGLAAMALYKQWHATLFSVELPDTVVQIFAYLGPELNPCGEEVDYCCFVGFPGLPTLKASSSTTEAVRDAMAAYRLSDGLWPALGMSAFHFLAPWDPEDRWPGESEAKRVEGAVHRLQLGTEDDWGAGRVSCILESDAVMQGPWFAKFDFSAFFPTLYLLLFPANERLAEVVRLRARGQHPTLKLALVSFFGGLQHINPVAYRSIIALSNGISKRLEHEVNQRGFAICTYVKDGFWGAAGNLPSDSVSYADALVYAEELRSAAQKAALGHVSEMGFSLPEGVHLNLRLEGLFTDAISWSTHCYWLYNRFTKMEDFVGFPAKSGAGRAAKASLSALLPLVAAVCDSSDMSTLHQSVRGACEQLVAGAFAERNNPQFWSTRTGIESSTLLPPAVYRNGSLLDRDCGQREIVLTRKHDCESPSPVPWTLFPPPLVLGRIDCMVYLTSIFKTYLSMLNRAISASCDADESMNVDFPISDYAFLFT

SEQ ID NO: 212 - protein, 303 aa, Equine herpesvirus 1
MSATMRAEIDPLAHSATVDEMVEAITKGDDSVTTIVDDLVWHATPRFVTEVREVPGLPPSFTTTSVTDMRVDASSEKLMLTLDGQEGSEISCETYMRSCLDLPAFKGFSLFVVTPLEDRVNVLGVAPVILSHRLVLYRPTDLIDFTLCIIQMYLENCSTKRATSSLFVQIECILRNISKTITPLLKMRRLMYIGATWTLNTLMCVTNHNPFDQARVLPNYMMAKMLLGQKSNTPAILDAIYSAGYRQTLSKRPITPCPSGVLRCNKAHLNAPLCTKVVADTLYSWWTATDEKPVPESIYVLYD

SEQ ID NO: 213 - protein, 753 aa, Equine herpesvirus 1
MSADSIEPKQKRLRYADANKGRKVERKNTPRFEATTGLQSPGEEEQISADGGWVLIHPTPKTMLFKEILMGELGYTEGQGVYNAIRSTEAAIRQIQTTILTNTLNATRYEDLAKDWQTHLDSRGVSAEEIAATYGMYSEGEAVRVAEQIFATWHRTLQMSLLDFVRSITACFSASEPDGTASFAKYIDWIACLGLIPLQRLKRAPGATVHPKLWRKLPTDVPSLESCVDERDLAGKLYVANSLLREGLEAVVELARCTASVAIMDYDRVNIFYHYTRREVVAIDSTTGKRGECLVLWQPIWKDGSVLFDSPLQRICGEVCNCHALREHAKLCQLLNTVPVKILVGRKKDEAQGPGWASKAVDKLMGEGEELHSSSAASRLVKLIVNMKSMRHIGDITETVRSYLNETSTNLLSGAQVDTSLPGFGQSGKTKQGGNMPVQEAFRTSVINGINGMLEGYVNNLFKTIEDLRTGNSGLLDQLRDRESEITHLREQLLRVSQAAADGSTQPGASSAALPGSGAKSGAGGLGHEVIDIRNLMGDDGYVANSFQSRYIPAYTADMERLSRLWDQELLRCFKMNRITNNQGQEMSVSYSNSSISLLLAPYFFSILRARHLGFLITHQEAYRSEEELCVAVFKKTRLEAYLTELSTLFVARVRNSIAALNSTKRDLPVNDNEAQSDEEQLGKPSDERYYEGRDRSASPQRDRGRNGRGYHKRRRFSNNYRRRSGLARDSSIRDRSQRGSRPTPLLHDHVGH

SEQ ID NO: 214 - protein, 881 aa, Equine herpesvirus 1
MESADILPGSRGTVDRRCEGSEEKITPPRPVEDFNPQLFPNEVYLNFTSMHGIQPVVARIRELSRKTVSAAMVPPLEWFERLPRLETPLDIEPLHLPFSVYLISGNAGSGKSTCIQTLNETMDCVITGATRVAAQNVYTKLSSAFATRHINTIFQEFGFRGNHVQAQLGKYQYSCSSSPPPIEELQKRDIVYYWEVLVDITRRLFESTASRGEFENIRALERLLGRAPGSLTRLAFCTNGSLPAFTRTNIVIIDEAGLLGRHLLTVVVYCWWMLNAAYKSPQYAEGKVPVIVCVGSPTQTDSLESRFEHKNLKCHVRSSENVLTHIITNRTIREYVSLSTNWAIFINNKRCQEYEFGELMKVLEYGLPITEEHMRLVDTFVVPEAYINNPANLPGWTRLYSSHKEVSAYMAKLHAHLKVSGERQFVVFTLPAYTFVKTAAFDEYKKITQQPSLSLDKWLAANASRVSNYSQSRDQDAGKTQCEYYSEHGVVVARTDVTYVLNSQVSVTTRMRKFVFGFSGTFETFDAVLKDDAFIKTQGETSVEYAYRFLSTLLFSGMINFYNFLKRPGLDEGRVREAYRRMAALTAKLIPGASVLESACDNPSGAPLNFRGLTDPPGFTGGTTNDWDDDNDVVFAALNEGAIDMLYCNYEFVRPETTQEVYSQFLMLKTMFVGRYSIFMDLFGGDFESSPFDTFVDNISYKGCEIFVGSMRGGVSSIALQTDSYTLMGYTSAPVYPFVEELARRKLHEGIAELFGAMNMPRMVLRDQHGFMSVLNVNLSEFVESVDDVELDMATAVDYGLSSKLAMTIARSQGLSLDKVAICFPRNNLRINSVYVAMSRTVSSRFLRMNLNPLRERHERDTVISEHILAALRDRDVQIVY

SEQ ID NO: 215 - protein, 225 aa, Equine herpesvirus 1
METCSPPVTFITYALYGIKTSPAWTLPNFEQVICSCDWGYRLIAVGAESKCDVTPQGSFVIQHGASITALVLDCGVEFCSYAFTHAENTRVPLTTEDGSVLVVPFCGWVCVGRDRCLRSMSGGVLTISWDTSQTAYISVAVYRPPTLQCHALDCTRAETTVCSTAAITDASESDPLYADQEGDQTQDQDGGHDFLETILMESDLYGTNGASALLEPCFPCLSNND

SEQ ID NO: 216 - protein, 179 aa, Equine herpesvirus 1
MDVFGRGRAATADDYRRFLERNSRAAAKLAAATTPTHTASSRQQPEVSARPRHRSLSSRRNSVPHYDPHAGAGGDGQLALSERPSGTLGALAMAAQRRKSIGRPDTPVNAAMGSALRSSQRPRGDVRNPRGEGQTQRGGSRGEANHAQRRQSVTQSTAARQTQPHQGRPRPRRNTLRHM

SEQ ID NO: 217 - protein, 212 aa, Equine herpesvirus 1
MESALTVLSGWGWPVEVVTGPVADHLTEMRPPAPTGTTCTTTSTPTPLCVPDLSVESIKGLAPDGENANYVGFDTMFMVSSIDELGRRQLTDTIRKDLRVTLAKFTIACTKTSSFSSASSTRRRKRHCPSSERVMRSNKSLQMFVLCRRAHAKQIRDQLQSVIQARKPRKYYTRSSDGRTHPVVPVYIYEFSAVDKVYLHRDNVIEADAQAK

SEQ ID NO: 218 - protein, 312 aa, Equine herpesvirus 1
MSSACDHETEASHVNIPETTPEENGSNSSTPTSEIGPACVVSPAPGETGAPPPKRRRPCGLPQGVALINTSVSTHPLFTTSCQSSWEDVEREFNIAPSWRPILEREMQQPYVRLLLNEYKLRCASEEVFPPKEDIFAWTRFSPPEKVRVVIVGQDPYHAPGQAHGLAFSVRKGVPVPPSLRNIYSAVQKSYPSFRHPMHGFLERWAEQGVLLINTTLTVARGKPGSHATLGWHRLVRAVIDRLCTTSQGLVFMLWGAHAQKSCSPNRQHHLVLTYGHPSPLSRVNFRDCPHFLEANAYLTKTGRKPVDWQIE

SEQ ID NO: 219 - protein, 218 aa, Equine herpesvirus 1
MYQILIGCVWQKSPYINQCTEFQPPLSFVTPERMRRFMRCWARLELVYMLAWIVTTKLVKATRLDFTWGPGEPKRILEASCGSGPIMKGQLFTSPNIKNLLNRTTGIMVKAHCNPPEAILWVDTPPKPVWVNPFAVVQGLAEDVTNGNMPQDFKEKLLFALDDSLSQSQSSPDEILGPPPLGCFTGPFFLSPPKSKDIAEGLKDSCIPASYYANLQKT

SEQ ID NO: 220 - protein, 218 aa, Equine herpesvirus 1; identical to SEQ ID NO: 219

SEQ ID NO: 221 - protein, 1487 aa, Equine herpesvirus 1
MASQRSDFAPDLYDFIESNDFGEDPLIRAASAAEEGFTQPAAPDLLYGSQNMFGVDDAPLSTPAVVIPPPSPTPEPRGGKAKRSPSAAGSGGPPTPAAAAQPASPAPSPAPGLAAMLKMVHSSVAPGNGRRATGSSSPGGGDAADPVALDSDTETCPGSPQPEFPSSASPGGGSPAPRVRSISISSSSSSSSSMDEDDQADGAGASSSSSSSSDDSDSDEGGEEETPRPRHSQNAAKTPSAAGSPGPSSGGDRPAAGAATPKSCRSGAASPGAPAPAPASAPAPSRPGGGLLPPGARILEYLEGVREANLAKTLERPEPPAGMASPPGRSPHRLPKDQRPKSALAGASKRKRANPRPIPQTQTQAPAEEAPQTAVWDLLDMNSSQATGAAAAAASAPAAASCAPGVYQREPLLTPSGDPWPGSDPPPMGRVRYGGTGDSRDGLWDDPEIVLAASRYAEAQAPVPVFVPEMGDSTKQYNALVRMVFESREAMSWLQNSKLSGQDQNLAQFCQKFIHAPRGHGSFITGSVANPLPHIGDAMAAGNALWALPHAAASVAMSRRYDRTQKSFILQSLRRAYADMAYPRDEAGRPDSLAAVAGYPAQAAAAAASQQQPEAPAPSVRVREAYTRVCAALGPRRKAAAAAAAPGTRAPRPSAFRLRELGDACVLACQAVFEALLRLRGGASAVPGLDPSEIPSPACPPEALCSNPAGLETAALSLYELRDLVERARLLGDSDPTHRLGSDELRLAVRAVLVVARTVAPLVRYNAEGARARASAWTVTQAVFSIPSLVGGMLGEAVSLLAPPTRSQQPSSSSPGGEPFSGSAAAEGSLQTLPPLWPTVPGKQSATVPSSHSQSPQHSQSGGGAGATTATCCRATQTNARSRGQQHQPQKARSPQAAASPAHLSQEAMPGSSSDDRAIHGRPRGKSGKRRSEPLEPAAQAGASASFSSSARGYDPSGPVDSPPAPKRRVATPGHQAPRALGPMPAEGPDRRGGFRRVPRGDCHTPRPSDAACAAYCPPELVAELIDNQLFPEAWRPALTFDPQALATIAARCSGPPARDGARFGELAASGPLRRRAAWMHQIPDPEDVKVVVLYSPLQDEDLLGGLPASRPGGSRREPLWSDLKGGLSALLAALGNRILTKRSHAWAGNWTGAPDVSALNAQGVLLLSTGDLAFTGCVEYLCLRLGSARRKLLVLDAVSTEDWPQDGPAISQYHIYMRAALTPRVACAVRWPRERHLSRAVLTSSTLFGPGLFARAEAAFARLYPDSAPLRLCRSSNVAYTVDTRAGERTRVPLAPREYRQRVLPDYDGCKDMRAQAEGLGFHDPDFEEGAAQSHRAANRWGLGAWLRPVYLACGRRGAGAVEPSELLIPELLSEFCRVALLEPDAEAEPLVLPITEAPRRRAPRVDWEPGFGSRSTSVLHMGATELCLPEPDDELEIDGAGDVELVVEHPGPSPGVAQALRRAPIKIEVVSDDEDGGDWCNPYLS

SEQ ID NO: 222 - protein, 293 aa, Equine herpesvirus 1
MPHGQPCGACDGSCRMAQRGTPSTSPLIPSLTPSPPAGDPSPRSSQRIDAVRVPARLPGGSDHPEYGMPLSPRALRPYLARGPGAFCAPPWRPDVNRLAGDVNRLFRGISTSSIHVTEDSRTLRRALLDFYAMGYTHTRPTLECWQSLLQLLPEQSFPLRATLRALNSEDRYEQRFLEPPSDPPNTLFGEECDVSGDESPSEEEEEDEASGESSVSEFSPEEETASSEYDSFSDVGEDDSSCTGKWSSSESESDSESDAPTNNHHPTTRASAAKKRRKRQPPKGERPTKSARR

SEQ ID NO: 223 - protein, 236 aa, Equine herpesvirus 1
MDGAYGHVHNGSPMAVDGEESGAGTGTGAGADGLYPTSTDTAAHAVSLPRSVGDFAAVVRAVSAEAADALRSGAGPPAEAWPRVYRMFCDMFGRYAASPMPVFHSADPLRRAVGRYLVDLGAAPVETHAELSGRMLFCAYWCCLGHAFACSRPQMYERACARFFETRLGIGETPPADAERYWAALLNMAGAEPELFPRHAAAAAYLRARGRKLPLQLPSAHRTAKTVAVTGQSINF

SEQ ID NO: 224 - protein, 272 aa, Equine herpesvirus 1
MNSDMMTAATAGTEVFRCALARRRNANPPHLVLAPTFAAAAAGGAANSSGEEAPRGERKHLFNPFGCMLGRSYFRRCREEMNEGYFAKVPTGYFPVAPSEVPCRVPVEGVVAGEVLSYSALPLPKIEKRFYKQLNDGTFVRLPFLYPEVYYEGEEEPADERYYIRADAADASSADPSTLPEEAFAKVPPAIAEGITNWQGPKRIPIPSERYVMKLGFEYQLHVTEDAFQEVNTSFMRLDLQSSPDPHPRGARQPRSRAHVSAENPEDTPVAV

SEQ ID NO: 225 - protein, 418 aa, Equine herpesvirus 1
MGVVLITVVTVVDRHKALPNSSIDVDGHLWEFLSRQCFVLASEPLGIPIVVRSADLYRFSSSLLTLPKACRPIVRTRGATAIALDRNGVVYHEDRMGVSIEWLSVLSGYNHLNSSLIINQPYHLWVLGAADLCKPVFDLIPGPKRMVYAEIADEFHKSWQPPFVCGKLFETIPWTTVEHNHPLKLRAAGGEDTVVGECGFSKHSSNSLVRPPTVKRVIYAVVDPARLREIPAPGRPLPRRRPSEGGDARPEAALARSRARSVHGRRRDAAPPRGPAGARRPPGGRRDVDGTPTLGSVRPDIHTLKGRGLSPVPHLALWVEQWFLALQKPRLYTHHRLALHNIPSILKGEKREDTFEDNRRDELRHDDSRHRRHRGLPLRARSPPQCQPAPPRLGPHLRRSRGRGGRQLQRRGGAERRA

SEQ ID NO: 226 - protein, 382 aa, Equine herpesvirus 1
MENKQCDHLTDWFSTTSDASESMDTTPPLPPPTPSVDPSYSGAAADEDLYSDISEGDLEYSDCDSASESDEDDDDCLIPSKEKAREVAASFGYTVIKTLTPGSEGRVMVATKDGQPEPVVLKIGQKGTTLIEAMMLRNVNHPSVIQMKDTLVSGAITCMVLPHYSSDLYTFLTKESRRIPIDQALIIEKQILEGLRYLHAQRIIHRDVKTENIFINSVDQVCIADFGAAQFPVVEPADLGLAGTVETNAPEVLARAKYNSKADIWSAGIVLFEMLAYPSTLFEDPPSTPEEYVKSCHSQLLKIISTLKINPEEFPRDPGSRLVRGYIEYSRLERKPYTRYPCFQRVNLHIDGEFLVHKMLAFNAAMRPSAEELLSYPMFAQL

SEQ ID NO: 227 - protein, 411 aa, Equine herpesvirus 1
MLTVLAALSLLSLLTSATGRLAPDELCYAEPRRTGSPPNTQPERPPVIFEPPTIAIKAESKGCELILLDPPIDVSYRREDKVNASIAWFFDFGACRMPIAYREYYGCIGNAVPSPETCDAYSFTLIRTEGIVEFTIVNMSLLFQPGIYDSGNFIYSVLLDYHIFTGRVTLEVEKDTNYPCGMIHGLTAYGNINVDETMDNASPHPRAVGCFPEPIDNEAWANVTFTELGIPDPNSFLDDEGDYPNISDCHSWESYTYPNTLRQATGPQTLLVGAVGLRILAQAWKFVGDETYDTIRAEAKNLETHVPSSAAESSLENQSTQEESNSPEVAHLRSVNSDDSTHTGGASNGIQDCDSQLKTVYACLALIGLGTCAMIGLIVYICVLRSKLSSRNFSRAQNVKHRNYQRLEYVA

SEQ ID NO: 228 - protein, 797 aa, Equine herpesvirus 1
MGFIYARKLLLCMAVSIYAIGSTTTTETTTSSSSTSGSGQSTSSGTTNSSSSPTTSPPTTSSSPPTSTHTSSPSSTSTQSSSTAATSSSAPSTASSTTSIPTSTSTETTTTTPTASTTTPTTTTAAPTTAATTTAVTTAASTSAETTTATATATSTPTTTTPTSTTTTTATTTVPTTASTTTDTTTAATTTAATTTAATTTAATTTAATTTAATTTAATTTAATTSSATTAATTTAATTTAATTTAATTTAATTTAATTTGSPTSGSTSTTGASTSTPSASTATSATPTSTSTSAAATTSTPTPTSAATSAESTTEAPTSTPTTDTTTPSEATTATTSPESTTVSASTTSATTTAFTTESHTSPDSSTGSTSTAEPSSTFTLTPSTATPSTDQFTGSSASTESDSTDSSTVPTTGTESITESSSTTEASTNLGSSTYESTEALETPDGNTTSGNTTPSPSPRTPSFADTQQTPDNGVSTQHTTINDHTTANAQKHAGHHRGRAGGRRGSPQGGSHTTPHPDRLTPSPDDTYDDDTNHPNGRNNSIEIVPQLPPDRPIIELGVATLRKNFMEASCTVETNSGLAIFWKIGNASVDAFNRGTTHTRLMRNGVPVYALVSTLRVPWLNVIPLTKITCAACPTNLVAGDGVDLNSCTTKSTTIPCPGQQRTHIFFSAKGDRAVCITSELVSQPTITWSVGSDRLRNDGFSQTWYGIQPGVCGILRSEVRIHRTTWRFGSTSKDYLCEVSASDSKTSDYKVLPNAHSTSNFALVAATTLTVTILCLLCCLYCMLTRPRASVY

SEQ ID NO: 229 - protein, 452 aa, Equine herpesvirus 1
MPAVLLVLYVNPPPSVCILTQKLSLGLYNQWWRVCRSVPPPWYVFFNKRSMSTFKLMMDGRLVFAMAIAILSVVLSCGTCEKAKRAVRGRQDRPKEFPPPRYNYTILTRYNATALASPFINDQVKNVDLRIVTATRPCEMIALIAKTNIDSILKELAAAQKTYSARLTWFKIMPTCATPIHDVSYMKCNPKLSFAMCDERSDILWQASLITMAAETDDELGLVLAAPAHSASGLYRRVIEIDGRRIYTDFSVTIPSERCPIAFEQNFGNPDRCKTPEQYSRGEVFTRRFLGEFNFPQGEHMTWLKFWFVYDGGNLPVQFYEAQAFARPVPPDNHPGFDSVESEITQNKTDPKPGQADPKPNQPFKWPSIKHLAPRLDEVDEVIEPVTKPPKTSKSNSTFVGISVGLGIAGLVLVGVILYVCLRRKKELKKSAQNGLTRLRSTFKDVKYTQLP

SEQ ID NO: 230 - protein, 424 aa, Equine herpesvirus 1
MAKLTGMFSAAILLSMAICSTAIIYRGEHMSMYLNASSEFAVYPTDQSLVLVGHLLFLDGQRLPTTNYSGLIELIHYNYSSVCYTVIQTISYESCPRVANNAFRSCLHKTSKHYHDYFRVNASVETNVLLNITKPQPTDSGAYILRVKLDHAPTADVFGVSAFVYDLKSKTVPDPMPTTQTVEPTTSYVSTPTYDYTDDVTTETESTSTSTQQAMTSTQTPSATWGTQLTTELPTNETVVIGQEALLCHWFQPSTRVPTLYLHLLGRTGNLPEDVLLVEDSEFLRTTSPAHRPSASPADGDDFKQTNSTSLKARNKIVAMVVIPTACVLMLLLVVVGAIINGAVRKHLLSCASRRIYRSGQGGASAAERRRLTCGPTLAASSESLADDTTSSPPTPKPSKKTKLETDPLMEQLNRKLEAIKEES

SEQ ID NO: 231 - protein, 550 aa, Equine herpesvirus 1
MELLAASRACIFFGLVTVLDAWGVQQVELSEGAWAMIDGRDVLTPTNTTTRVTKAWTFLETPPGCAGDISVKKVCVSHSLCEDNIIIGKHCNLLTGEHGIALAEFNVVNGSLRRTDDVYFVNGTVFPILAETRSVLQIHRATPSIAGVYTLHVSIDGMMKHSVVLLTVKKPPKQPQPRLRVKTPPPVTVPQVPVKTHTDFVVHGYHSRVYADGESFELSVNLESHIVEPSFSAEIQWYYMNTSSSSCDLFRVFETCIFHPTAMACLHPEQHTCSFTSPIRATKILHRVYGNCSDHGNSWPSRCHSTLLGNRLYFIQPAQNRVDLLFKDTPASATGLYVFVLLYNGHPEAWTYTLLSTANHFMNVLTDVTRPRLGEHFYTDLGHKIITPHPSVATTEELGAWTRHYLAFLLVIICTCAALLVALVVWGCILYIRSNRKPYEVLNPFETVYTSVPSNDPSDEVLVFERLASDSDDSFDSDSDEELEYPPPPKPAPQLPPYQFVDGGDAPSGRSGFKVWFRDTPEASPVPLHKPTLQGPDYSRVASKLKSILK

SEQ ID NO: 232 - protein, 130 aa, Equine herpesvirus 1
MSSNSDNTECFGGVNYAEGMRKRKRNPVRNSTFQEYLDARNARYPRSGSTSDSDEDYTTRSKYESDVSEFKKMMDLETLPPPKAEPQAQKAEPDAAKEEPVSTTSYILNEWVAPMIGHFLAMCMYELLFK

SEQ ID NO: 233 - protein, 219 aa, Equine herpesvirus 1
MEKAEAAAVVIPLSVSNPSYRGSGMSDQEVSEEQSAGDAWVSAAMAAAEAVAAAATSTGIDNTNDYTYTAASENGDPGFTLGDNTYGPNGAASGCPSPPSPEVVGLEMVVVSSLAPEIAAAVPADTIFASAAAPATRVDDGNAPLLGPGQAQDYDSESGCYYSESDNETASMFIRRVGRRQARRHRRRRVALTVAGVILVVVLCAISGIVGAFLARVFP

SEQ ID NO: 234 - protein, 272 aa, Equine herpesvirus 1; identical to SEQ ID NO: 224

SEQ ID NO: 235 - protein, 236 aa, Equine herpesvirus 1; identical to SEQ ID NO: 223

SEQ ID NO: 236 - protein, 293 aa, Equine herpesvirus 1; identical to SEQ ID NO: 222

SEQ ID NO: 237 - protein, 1487 aa, Equine herpesvirus 1; identical to SEQ ID NO: 221

SEQ ID NO: 238 - protein, 360 aa, African swine fever virus
MPSTLQALTKKVLATQPVLKDDYCILERCGLWWHEAPITIYHTCIDEQILIKTASFKHGLTLNVALMKAVQENNHGLIELFTEWGADISFGLVTVNMECTRTYAKVRCEEKALSENKILEIFYNVQYVKTSSNIILCHELLSDNPLFLNNAQLKLRIFGELDTLSINFTLDNISFNEMLTRYWYSMAILYKLTEAIQYFYQRYSHFKDWRLICGVAYNNVFDLHEIYNKEKTNIDIDEMMQLACMYDCNYTTIYYCFMLGADINRAMITSVMNFCEGNLFLCIDLGADAFEESMEIASQTNNWILINILLFKNYSPDSSLLSIKTTDPEKINALLDEEKYKSKNMLIYEESLFHIYGVNI

SEQ ID NO: 239 - protein, 362 aa, African swine fever virus
MSTPISLQALAKKILATQHISKEHYFILKYCGLWWHGAPIMLSTNEDNQLMIKSAIFKDGLELNLALMKTVQENNYDLIELFTEWGADINSSLVTVNTEHTWNFCRELGAKILNEMDIVQIFYKIHRIKTSSNIILCHKLLSNNPLFQNIEELKVIICCFLEKISINFILNEITFNEMLTRYWYSIAILCKLTEAIQYFYQRYSHFKDWRLICGLSFNNVSDLHEMYHIKKVDMNIDEMIYLACMRDSNFLTIYYCFVLGADINRAMVTSVKNFYMNNLFFCIDLGANAFEESLELAKQKNHDILVEILSFKDYYSSNVSLLSLKTTDPEKINALLKNYRSKNIMRYKKLCPEIIRWARFII

SEQ ID NO: 240 - protein, 189 aa, African swine fever virus
MRSSKKINNKKNMFNIKMTISTLLIALIILLIIILVVFLYYKKQQPPKKVCKVDKDCGSGEHCVRGSCSSLSCLDAVKMDKRNIKIDSKISSCEFTPNFYRFTDTAADEQQEFGKTRHPIKITPSPSESHSPQEVCEKYCSWGTDDCTGWEYVGDEKEGTCYVYNNPHHPVLKYGKDHIIALPRNHKHA

SEQ ID NO: 241 - protein, 81 aa, African swine fever virus
MDTSLKNNDGALEADNKNYQDYRAEPDKTNDVLDVTKYNSMVDCCHKNYSTFTSEWYINERKYNDVPEGPKKAVVHRCTIL

SEQ ID NO: 242 - protein, 52 aa, African swine fever virus
MDDTLPKQMTPTDTSSSKEEQAHCNNKTLEKQPKNINDNKCTDSQNTESSKV

SEQ ID NO: 243 - protein, 356 aa, African swine fever virus
MQPSTLQALAKRALATQHVSKDDYYILERYGLWWHEAPISMYIDDDNQIMIRTLCFKEGIRLNTALVLAVKENNDDLIMLFTEWGANINYGLLFINNEHTRNLCRKLGAKEELETSEILRFFFETKCKITSSNVILCHELFSNNPFLQNVNMVDLRMIIYWELKDLTTNSMLNEISFSEMLTKYWYGIAVKYNLKEAIQYFCQEYRHFDEWRLICALSFNNVFDLHEICNTTKIHMSINKMMELACMRDNNFLTIYYCFALGANANRAMLISVKNFCIENMFFCMDLGANVIEHSKTLADIYGYSIIVNILSLKIYKANPILLSKETNPEKINTLLKNYYSKNMLAYDICCIDNYL

SEQ ID NO: 244 - protein, 42 aa, African swine fever virus
VANALLASACKVDGCMFILLKKIKLSGKHKDQPVVNICSSIF

SEQ ID NO: 245 - protein, 214 aa, African swine fever virus
MLGLQIFTLLSIPTLLYTYELELLDLTRTPPEKELEYWCTYANHCRFCWDCQDGICKNKVFENHSPILENDYIANCSVFRHNEFCTYYVTSIKPHEVYRTECPQHNHEWHEAVIRKWQKLLTYGFYLVGCVLVANYIRKRSLQTIIYLMVLLVIFFLLSQLMLYRELEAKKHKIGSIPPERELEHWCTHGKYCDFCWDCQNGICRNKVFKMIPP

SEQ ID NO: 246 - protein, 37 aa, African swine fever virus
MATCEQVAARQQIAVYQQIAVYQQQLIISKCCLWVSQ

SEQ ID NO: 247 - protein, 104 aa, African swine fever virus
MRFFSYLGLLLAGLASLQGFSTDNPLEEELRYWCQYVKNCRFCWACQDGLCKNKVLKDMPPVQEHSYPMEHCMIHRQCKYIRDGPIFQAECTMQTCDAIHLLNA

SEQ ID NO: 248 - protein, 124 aa, African swine fever virus
MLVIFLEILGLLANQVLGLPTQAGGHLRSTDNPPQEELGYWCTYMENCKFCWECAHGICKNKVNKSMPLIVENSYLTSCEVSRWYNQCTYGEGNGHYHVMDCSDPVPHNRPHQLLMKIYEKDDL

SEQ ID NO: 249 - protein, 51 aa, African swine fever virus
MYMVPHIKKNKRNYLILAVIFFQLATSQVTKELHCSFILRKRLNFGQKNHI

SEQ ID NO: 250 - protein, 124 aa, African swine fever virus
MLVVFLGILGLLANQVVGLPTQAGGHLRSTDNPPQEELGYWCTYMERCKFCWECAHGICKNKVNNSMPLIIENSYLTTCEVSRWYNQCTYGEGNGHYHVMDCSDPVPHNRPYQLLMKIYEKKDL

SEQ ID NO: 251 - protein, 205 aa, African swine fever virus
MLVIFLGILGLLASQVSSQLVGQLRPTEEPPEEELEYWCAYMESCQFCWDCQDGTCINKIDGSVIYKNEYVKSCLVSRWLDKCMYDLDKGIYHTMNCNQVLGLPNQPAGQLHPTDNPPQEELEYWCTYTENCKFCWNCQNGLCEGKLENTTILENEYVQSCIVSRWLNKCMYDLGQGIHHVMACSEPKPWNPYKILKREWKENNS

SEQ ID NO: 252 - protein, 137 aa, African swine fever virus
MLVIILGIIGLLASSNLVSSSTSTRVGGHLPLTFEPPENELGYWCTYVESCRFCWDCEDGICTSRVWGNNSTSIIENDYVKYCEVSRWGDLCRYDVEEHIYHSMNCSDPKPWNPYKIARKEWKKNEHPRKDLKKDEF

SEQ ID NO: 253 - protein, 127 aa, African swine fever virus
VATIKVLILVLLGVVVLQAAPIRKLEDLLPTRYPPEHELVYWCTYANQCDFCWECVHGICRNRIQTDWPVIHQNDWIINCTVSRWNGICSYYEGPKNHTDHQMDCANPTSHTYPHREYMKIYERDDL

SEQ ID NO: 254 - protein, 124 aa, African swine fever virus
MVRLFRNPIKCLFYRRSRKIQEKKLRKSLKKLNFYHPPEDCCQIYRLLENVPGGTYFITENMTNDLIMVVKDSVDKKIKSIKLYLHGSYIKIHQHYYINIYMYLMRYTQIYKYPLICFNKYYNI

SEQ ID NO: 255 - protein, 47 aa, African swine fever virus
MICNYKFVFFSYFATGNIKWWPVHLFNKKILTNLLLSLSLTYPVTIL

SEQ ID NO: 256 - protein, 290 aa, African swine fever virus
MKVIVFLLVLAVMQPVIQSQSFPGTGELPMTRRPPKRELEYWCTYAKSCDFCWNCRHGVCKNKVFEKHPLIKKNDYIQICRVSRYNERCSYFTDSRIRRFHIMSCTNPTYYDWFDELMQIKEDRVIDTENIKHTCLCMIATIALISYVRKQYSRMRMQAATRLLIFLGFYVLLGILMTNIIMNLPLSTDNPMQMRRPPERDLKFWCTYAKHCDFCWTCKDGMCKNKVFSDHPIITQNDYIVNCTVSRWHDRCMYEAHFRIHYQHNMNCSQPKDLEWFIELKRHVINQDDL

SEQ ID NO: 257 - protein, 63 aa, African swine fever virus
MAATYKLQLMGCNTATYRLHLIDRDSKGMKTLPSIQNLSFNPDNVSVYEKKFFLLMYEFLYES

SEQ ID NO: 258 - protein, 119 aa, African swine fever virus
MKLLALLCILIWLSQPGLNRPLSIFYMKQNLPRTYTPPIRELEYWCTYGKHCDFCWECRNGICKNKVWDDMPLIKQNDYISQCSIARYFDRCMYFIKPKSPYIHYMDCFQPTAYKGFSH

SEQ ID NO: 259 - protein, 116 aa, African swine fever virus
MKVLGLLLGYSVLILAHELPELPRTQHPPKEELPYWCTYVKNCDFCWDCQNGICKNKITNESNSMNSIVNCIVNRNSWGCFYEISVKMPNHHNMECSHPRPYTGNEIFMEKWGGGG

SEQ ID NO: 260 - protein, 119 aa, African swine fever virus
MKVFLGLLLGYSTILILTYQSPTTPWCFYEISLKIPNHHSMKCCSYPRLYEHEMFMEKWRDKNWPIIIRYYCFYLVFSFVFAGCVAFAICKNLRLSTTMKLLMLLSILVLLLSQPILNN

SEQ ID NO: 261 - protein, 274 aa, African swine fever virus
MKVLLGLLLGYSVLILAHELPDLPRTQHPPKSELSYWCTYVPQCDFCWDCQDGICKNKITESRFIDSNHSIVNCRVFRDSKTQSCLYEISSKMPNHFSMECLHPRPYTGNEIFMQTWGGGGGDHQQLSIKQYCLYFIIGIAYTGCFVCALCKNLRLSTTMKLFVLLSILVWLAQPVLNRPLSIFYTKQILPRTYTPPMRELEYWCTYGKHCDFCWDCKNGICKNKVLDDMPLIVQNDYISKCSITRFIDRCMYFIEPKIPYIHYMNCSLPTYFS

SEQ ID NO: 262 - protein, 387 aa, African swine fever virus
MNSLQVLTKKVLIETKAFSNYHEDDIFILQQLGLWWENGPIGFCKQCKMVTGGSMSCSDVDSYELDRALVKAVKENQTDLIKLFVLWGADINFGIMCAKTKQTKDLCIQLGANPEFLDVGLYNMFVYLVKRKKVLLAIEIYYDNILILDSFNSNDFHLLIDFVYNRFILYLDEKEEEMTRNTLVLKFWYKFAIDFNLTKPIHYLSKKFPHLDLWRLQTAIYLGNIDEVHHAYFQENIRLGLNVMMFLACARPGNKLGIYYCFALGADLDRALERLISFNSINREINRKIRGEKRLCIEGSYLSNVYFCIGLGANPYTKKIQEIIKQKHSNIMILLFSKKKILSPHSVLQNKILDPSDVHKMISTYKNTESFYPFSSLAVKLIQQANI

SEQ ID NO: 263 - protein, 42 aa, African swine fever virus
MFDLSSILIRGGGVLIALTLLWIIEYNEYFIDAKHFNSSSEA

SEQ ID NO: 264 - protein, 38 aa, African swine fever virus
MFIIHTNIMNFFCNIKLFLYHFRSIHKKNILKLFNFIE

SEQ ID NO: 265 - protein, 375 aa, African swine fever virus
MNSLQVLTKKVLIENKAFSNYHEDDIFILQQLGLWWENGPIGFCKQCKMVTSGSMSCSDVDSYELDRALVRAVKKNQTDLIKLFVLWGANINYGIICAKTERTKVLCIQLGADPKFLDVGLYNMFVDLIKQQKVLLAIDIYYDNISILDSFDSHDFYVLIDFIYNRFILNLDEKEKMIKNTYVLKFWFKIAIEFNLIKPIRFLSKKFPHLDYWRLKTAVYLGNVDEIHHAYFQENIRLDPNDMMSLACMYPQNKLGIYYCFALGANINTALETLIGFINHEVNREITFFSNYGIWSNVHFCISLGANPYTKKIQETLLRQEKNVMMKLLFKKGLLSPHSILHKKILEPSEVRKIISTYEYTETFHSFSSLRDNLR

SEQ ID NO: 266 - protein, 41 aa, African swine fever virus
MFNISSILIQGSVMILILLLWIINENFTDAGGNNFNHTVLM

SEQ ID NO: 267 - protein, 37 aa, African swine fever virus
MLKCLKIIVHQCCKFDQNLISHKKGTHQHCSFKFHDV

SEQ ID NO: 268 - protein, 44 aa, African swine fever virus
MFDSLLPTITGGGGGSLIALALLWFADYYVEFIEARLDSNITAV

SEQ ID NO: 269 - protein, 38 aa, African swine fever virus
MIKNRCIAQYSFGTSLEMIQATMITMYNSIVIFFFCNV

SEQ ID NO: 270 - protein, 69 aa, African swine fever virus
MLLYIVIIVACIISKLVPNEYWAIHLFFIIMIFMVYMYEKLDIHQKSQFWNYTMSGLSGHNVQVTCKCY

SEQ ID NO: 271 - protein, 268 aa, African swine fever virus
MVSLTTCCLKNIVNQHAYVENTVLLYHLGLRWNCKTLYQCTQCNGVNYTNSHSDQCKNKDLFLIKVIVKKNLAVARTLLSWGASPEYARLFCRNTEEEQALNVQHVADVPSSKILERLTMSYKGNDEQLLITFYLLNLSTNFSTNLREQVRFKIVSYIICDLAIHQTFKIFYAKNYSLSTLYCIFLAIYYKLYTALRKMVKIYPGLKSFAYLTGFMFDDETVMETYNSTDDEISECKNRIITIKGYYGNIHCRSDIDHMYAFSQNNFW

SEQ ID NO: 272 - protein, 330 aa, African swine fever virus
MQSLFNIALKALTLKNHVEFLKRDKEVLTRLGLCCKNYDLIHKCSECGNICPNGQQHGTCININYLLIYAVKRDNYMLAYRLLCWGANEKFAHYFRRPLPNLKPLLPKKELTPKDIKQLAYEHFHSDSELITVFEVFRKSRNINDCLEFFYKKNIEFEIYFARLYVYSKTFYRKSWYWFCIFMAVKHSMEHALKKITKTYIPTFYNKTTLPLVLFLSACFYENVEWMKNFFYKANKKIQQKMLSYGMEWAATHGKVRTFVCCYTLGGTASLKMYQKAYQNERYMIMALCSYLGNIQINNPWDSLNPYMMVQNKEKFLPLKFSEETQYFYI

SEQ ID NO: 273 - protein, 319 aa, African swine fever virus
MLSLQTLAKKAVAKQSVPEEYHYILKYCGLWWQNKPISLCHYCNYVILSSTPFKGELLHLDVALIMAIKENNYDVIRLFTEWGANIYYGLTCARTEQTQELCRKLGAKDSLNNKEIFTGLMRHKTSNNIILCHEIFDKNPMLEALNVQEMGEEIHRELKFFIFYILDNVPMNVFVKYCYAIAVKYKLKRAISFFYQTYGHLSMWRLMCAIYFNNVFDLHEIYEQKIVHMDIDKMMQLACMKDYNFLTIYYCFVLGGDIDQAITATQWHHQTNNLYFCKDLKDLKQNTLTARPLLLPNITDPKKIYTMLKNYLPTSSNSL

SEQ ID NO: 274 - protein, 350 aa, African swine fever virus
MVLSLQTLTKKVLASQYPAKCHPHFLKCCGLWWHNGPIMYHQKKIWTPYFKNGTNLNAALVKAVEENNHDLIELFTEWGANINYGLLSVNTEHTRDLCRQLGAKEQLNDQEILRFFYTLKRDLTSSNIIFCHEVFSNNPILDTINRFEVKGMIYEQLEGLMVETDILSEMFTKYWYAMAIECNLKEAICYFYQRYAHLHRWRLMCALFYNNVFELHEVYEKERIRIDMNEMLKWACRKNYNYLTIYYCCVVLGADINQAMFHSIQFYNIGNIFFCIDLGANAFEEGKTLAHQKDNSFIASMLSLNCYNMNDSLSLKETDPEVIKRMLKDYHSKNLSIAHKHYINDGFNDI

SEQ ID NO: 275 - protein, 345 aa, African swine fever virus
MFPSLQSFAKKVLARQQVSIEYHVILERCGLWWYKAPISLDCKHMLIKLPSFADGLDLNTALMLATKENNYQLIKLFTEWGADINYGLICANTPPVREFCWELGAKYRVDKKKIMHMFFKLIHPGTTSSNIILCLKLFNDNPFPAYVIIREIRSSIYWKLKRLVEDTDILSNMSDGDMLTIYCFIVALQDNLREAISYVYQHFKYLNTWWLICALCFNKLFDLHNLYEKEKIRMDVDEMMRMACTKDNNFLTIYYCFLLGANINSAMLACVRFYNMDNLFFCIDLGADAFEEAKALAEQRNYYLISHHLSLDIYSADSSLLTLKEADPNKIYHLLKNYKLKSMLA

SEQ ID NO: 276 - protein, 353 aa, African swine fever virus
MLPSLQSLTKKVLAGQCIPVDQYHVLKCCGLWWHNGPIMLHIRRNKLFIRSTCFSQGIELNIGLMKAVKENNHDLIKLFTEWGADINYGMICALTENTRDLCKELGAKEYLEREYILKIFFDTTRDKTSSNIIFCHEVFSNNPNLRIIDNLDLRGEIMWELRGLMEITFMLDHDDSFSTVLTKYWYAIAVDYDLKDAIRYFYQKYPRLHRWRLMCALFYNNVFDLHELYEIERVRMDIDEMMHIACIQDYSYSAIYYCFIMGANINQAMLVSIQNYNLGNLFFCIDLGADAFEEGKALAEQKENYLIAHALSLKHYNPVISLLSIVTDPEKINCMLKNYHSINMGIFLDYEQR

SEQ ID NO: 277 - protein, 531 aa, African swine fever virus
MFSLQNLCRKTLPNRKLPEFFDEYILQLLGLYWENHGTIQRAGNNCVLIQQHTLIPVNEALRTAASEENYEIVSLLLAWEGNLYYAIIGALEGNRHDLIRKYDDQIKDHHEILPFIDDPVIFHKCHIMRQCFFDCILYQAVKYSKFRVLLYFKHRLEDDLPFTHLLIEKACKDHNYEVIKWIYENLHIYNMIDTFECAIAHKDLHLYCLGYRFIYNRIVPDKYHHLDIRMLSSLQLLHKVAAKGYLDFILETLKYDHNKDNINIILTQAATYNHRKILIYFIPQSTHAQIEQCLLVAIKAKSSRKTLNLLLSHLNLSINLIKKISHYVATYNSTNIIGILSMRRKKKIYLDIILTKFVKKAIFNKFVVRCMDTFSINPERILKIAARINRMMLVKKISEHVWKNHAVRLKYLKHAVHTMKHKDGKNRLMNFIYDRCYYHMQGEEIFSLARFYAIHHAPKLFDVFYDCCILDTIRFKSLLLDCSHIIGKNAHDATNINIVNKYIGNLFVMGVLSKKEILQDYPSIYSKQYMP

SEQ ID NO: 278 - protein, 350 aa, African swine fever virus
MLPSLQSLTKKVLAGQCVPTNQHYLLKCYDLWWHDAPITFDHNLRLIKSAGIKEGLNLNTALVKAVRENNYNLIKLFAEWGADINYGLVSVNTEHTWDLCRELGAKETLNEEEILQIFIDLKFHKTSSNIILCHEVFSNNPILQKVNNIKMRIEIFWELRELIVKTDLLNNEFSLSTLLLKYWYAIAIRYNLKEAIQYFYQKYTHLNTWRLTCALCFNNVFDLHEAYEKDKIHMDIEEMMRIACIKDHNLSTMYYCYVLGANINQAMLSSIQYYNIENMFFCIDLGADVFEEGTTALGEGYELIKNILSLKIYSPATTPLPKSTDPEIIDHALKNYVSKNMMIFLTYDLR

SEQ ID NO: 279 - protein, 353 aa, African swine fever virus
MSLPLSLQTLVKKTIASQCLSIDEHCILKYCGLWWHDAPLKLCMDRGRIQIKSGFLGEDIDLRVALIIAVKENNYSLIKLFTEWGANINYGLLSINTKHIRELCRQLGAKETLEDNDIFRIFTRIMHNKTSGSIILCHEIFMNNPILENKFVIQLRGLIYKRLWGLIEIKETDELNGLLVKYWYAKAVQYDCKDAICFLDEKYTDLNEWRLKCLLYYNKIYELHEMYHKENIQIDVHDMICLASTKDNNPLTIYYCYALGGNINQAMLTSVQYYNIGNIFFCIDLGGNAFEEGRAIAEQKGYNFLSHSLALDIYSSDASLPLNLKDPEEISSLLKDYKSKNLSIIWEYSHNIL

SEQ ID NO: 280 - protein, 357 aa, African swine fever virus
MLSLQTLAKKVVACNYLSSDYDYTLQRFGLWWDLGPIHLCNNCKQVFSYKHLQCFSEDDLCLEAALVKAVKSDNLELIRLFVDWGANPEYGLIRVPAVYLKRLCAELGGLTPVSEPRLLEILKEVARLKSCAGVLLGYDMFCHNPLLETVTRTTLDTVTYTCSNIPLTGDTAHHLLTKFWFALALRHNFTKAIHYFYKRHKNHLYWRVACSLYFNNIFDIHELCREKEICISPNLMMKFACLREKNYAAIYYCHRLGASLDYGMNLSIYNNNTLNMFFCIDLGAADFDRAQLIAHKAYMYNLSNIFLVKQLFSRDVTLVLDVTEPQEIYDMLKTYTSKNLKRAEEYLTAHPEIIVID

SEQ ID NO: 281 - protein, 526 aa, African swine fever virus
MFSLQDLCRKHLFILPDVFGEHVLQRLGLYWRCHGSLQRIGDDHILIRRDLILSTNEALRMAGEEGNNEVVKLLLLWKGNLHYAVIGALQGDQYDLIHKYENQIGDFHFILPLIQDANTFEKCHALERFCGVSCLLKHATKYNMLPILQKYQEELSMRAYLHETLFELACLWQRYDVLKWIEQTIHVYDLKIMFNIAISKRDLTMYSLGYIFLFDRGNTEATLLTQHLKKTAAKGLLHFVLETLKYGGNIDTVLTQAVKYNHRKLLDYFLRQLPRKHIEKLLLLAVQEKASKKTLNLLLSHLNYSVKRIKKLPRYVIEYESTLVIKILLKKRVNLIDAMLEKMVRYFSATKVRTIMDELSISPERVIKMAIQKMRTDIVIHTSYVWEDDLERLTRLKNMVYTIKYEHGKKMLIKVMHGIYKNLLYGEREKVMFYLAKLYVAQNAATQFRDICKDCYKLDVARFKPRFKQLILDCLEIITKKSCYSILEILEKHIISLFTMKVMTEEEKNLCLEILYKVIHYKTIQC

SEQ ID NO: 282 - protein, 280 aa, African swine fever virus
MSSSLQELCRKKLPDCILPEFFDDYVLQLLGLHWQDHGSLQRIEKNQILVQQEPIHINEALKVAASEGNYEIVELLLSWEADPRYAVVGALESKYYDLVYKYYDQVKDCHDILPLIQNPETFERCHELNSTCSLKCLFKHAVINDMLPILQKYTDYLDRWEYCSQMLFELACSKKKYEMVVWIEGVLGVGKVTSLFTIAISNRDLQLYSLGYSIILENLYSCGQDPKFLLNHFLRDVSIKGLLPFVIKTIEYGGSKEIAITLAKKYQHKHILKYFETWES

SEQ ID NO: 283 - protein, 40 aa, African swine fever virus
MFPTDVLKRKHLFTKKNINFTGILMYDKTVVHWFEISKTI

SEQ ID NO: 284 - protein, 506 aa, African swine fever virus
MFSLQDICRKHLFQLPDAFDEYILQALGLYWEKHGSLQRIRKDAVFVQRNIVLSTNEALRIAASEGNERVIKLLLSWEGNFHYVIIGALEGDQYDLIHKYDSQIKDYHMILSLIQNANTFEKCHQLSNSNMWCLIQNAIKYNMLPILQKHRNILTHEGENQELFEMACEEQKYDIVLWIGQTLMLNEPEFIFDIAFERIDFSLLTMGYSLLFDNKMSSIDIHDEEDLTSLPTEHLEKAATKGCFFFMLETLKHGGNVNMAVLSKAVEYNHRKILDHFIRRQKCLSREEIENLLLTAITNCASIKTLNLLLSYLNYSVKNIIGKIVQHVIKDGDYTIILLLKKKKINLVEPVLTGFIDYYYSYCFIKHFIQEFAIRPEKLIKMAARKGKLNMIIEFLNEKYVHKDDLGTIFKYLKTLVCTMKHKKGKETLIVLIHKIYQDIHLETKEKFKLLRFYVMHDATIQFLSMCKDCFNLAGFKPFVLECLDIAIKKNYPDMIQYIEILSKSE

SEQ ID NO: 285 - protein, 498 aa, African swine fever virus
MFSLQEICRKNIYFLPDWLGEHVIQRLGLYWEKHGSLQRIGDNYVLIQQDLIIPINEALRMAGEEGNDEVVQLLLLWEGNIHYAIIGALESDHYSLIRKLYDQIEDCHDILPLIQDPKLFEKCHELDKSCNILCLVLHAVKNDMLCILQEYKMHLSGEDIQVVFETACRSQKNDIVSWMGQNIAIYNPEVIFDIAFDKMNVSLLSIGYTLLFNHHINNTNENINSLLTQHLEWAAGMGLLHFMLETLKYGGDVTIIVLSEAVKYDHRKILDYFLRRKNLYQEDLEELLLLAIRADCSKKTLNLLLSYLNYSINNIRKKILQCVKEYETTVIIKILRKRKINLIEPILADFIGYHSYTYMVDFMREFSIHPEKMIKMAARESREDLIIKFSKKVCKEPKDRLHYLKSLVYTMRHKEGKQLLIYTIHNLYKACHLESKEMFNLARFYARHNAVIQFKSICHDLSKLNINIKNLLLECLGIAIKKNYFQLIKTIETDMRYE

SEQ ID NO: 286 - protein, 525 aa, African swine fever virus
MFSLQDLCRKNIFFLPNDFSKHTLQWLGLYWKEHGSVHRAEKDSIMIQNELVLSINDALQLAGEEGDTDVVQLLLLWEGNLHYAIIGALKTEKYNLICEYHSQIQDWHILLPMIQDPETFEKCHDLSLGCDFICLLQHAVKYNMLSILVKYKEDLLNARIRHRIQSLFVLACENRRIEIIDWIGQNLPIPEPDAIFSIAVATRDLELFSLGYKIIFDYMQRQGIIQLTNGVRMVVLNRHISMAIDNGLLPFVLETLKHGGNIHRALSYAVTHNRRKILDYLIRQKNIAPNTIERLLYLAVKNQSSRKTLNLLLSYINYKVKNVKKLVEHVVNEKSTLVLKILLEKKENLVDAVLTRLVKHSTYFQVREFIQEFSISPEKFIKIAVREKKNVLIEAISEDIWENPTERITYLKQIVHTIKYESGRRFLVDIIHSIYQSYSLKHEDILKLATFYVKHNAITHFKDLCKYLWLNRGTESKKLFLECLEIADEKEFPDIKSIVSEYINYLFTAGAITKEEIMQAYDALE

SEQ ID NO: 287 - protein, 527 aa, African swine fever virus
MFSLQDLCRKNTFFLPSDFSKHTLHLLGLYWKGHGSIQRIKNDGVLIEHDLTLSINEALILAGEEGNNEVVKLLLLWEGNLHYAIIGALRTENYNLVCEYHSQIQDWHVLLPLIQDPETFEKCHDLSLECDLSCLLQHAVKYNMLSILVKYKEDLLNVLFRQQIQGLFILACENRKLEILTWMGQNLPIPDPEPIFSIAVVTKDLEMFSLGYKIVFEYMENQGLHLTQVVRMVMLNHHFGMVINKGLLPFVLEILNYGGNVNRALSYAVTQNKRKILDHVVRQKNIPHKTIERMLHLAVKKHAPRKTLNLLLSYINYKVKNVKKLLEHVVKYNSTLVIRLLLEKKKNLLDATLTRYVKDSTYFQVKEFMQDFSISPEKFIKIAVREKRNVLIKGISEDIWENPAERIRNLKQIVCTIKYESGRQFLINIIHTIYQSYSLKPEEILKLATFYVKHNATTHFKDLCKYLWLNRRTESKKLFLECLEIADKKEFPDIKSIVSEYINYLFTAGAITKEEIMQAYALEYAMY

SEQ ID NO: 288 - protein, 506 aa, African swine fever virus
MFSLQDLCRKNLFLPLEPLGKHVVQRLGLYWEGHGSVKRVGDCFICVDQIWMLSIHKAIQIAASEGNENIVKLFLLWKGSLQYAIIGALEGRQYDLIQKYYNQIGDCHQILPLIQDPEIYERCHELNVTCTFQCLFQHAIRDNMLPIFQKYGEDLNGNRRMVQLLYEMACRLQNYDIIKWIGSNLHVYNLEAIFSIAFVRKDLTLYSLGYMLLLGRMSTEDRNFISIITRHLEYASKKGLFDFVLESLKYGGQVDTVLFQAVKYNHRKILAHFIHEIPRETVEKLILHAVESRASRKTFNLLLSSINYCVNPFVKKLLHAVVKHKYMLIIKLLLERPKKKINLVDAALFKLVKYSTYTEIVKYMGEFSVDPKRVVKMAARLMRVDLIKKISNDAWEDKLERIKHLKQMVNTMNHRNGKNLLMYNIHNITGYTYLNTKEAFNLTRFYAVHNATCLFKEMCKSCFVHDKIQLRELLEDCLHIANRHDYIQIAETADECIKYIDLITFK

SEQ ID NO: 289 - protein, 542 aa, African swine fever virus
MFSLQELCRKNIYILPYPLAKHVLQQLGLYWKGHGSLQRIGDDHVLLQQDLIFSINEALRMAGEEGNNEVVKLLLLWEGNLHYAIIGALEGDRYDLIHKYYDQIGDCHKILPLIQDPQIFEKCHELSNSCNIRCLLEHAVKHDMLSILQKHKEQIRLHMALTQILFELACHERKNDIIRWIGYSLHIHHLETIFDVAFAHKNLSLYVLGYELLMHKVNTEAAYIELPNLLSYHLRTAAAGGLLNFMLETIKHGGYLDKTVLSAAIRYKHRKIVAHFIHQVPRKTVKKLLLYAVQARAPKKTLNLLLSSLNYSVHTITKQLVHNVVIYSSTLIVKLLLMRRKNKLNLVDAVLARLVKYSTYTDIVQFMGEFSVSPERVIKMAARESRTFLIEMISKAAWGNHPQTLIHHLKQLTNTMKPQSGKDHIIYTIHYIYLNSNMLVAEEEKNIFKLAKFYANHNAVNRFKQICEDYYILDARFKTLILECFEIAVQKNYPRIANIVDDYIRFLFYRGNITEEEIREAYSLKDAEVYVDLKWLQQGEMV

SEQ ID NO: 290 - protein, 224 aa, African swine fever virus
MFPKINTIDPYISLRLFEVKPKYVGYSSIDARNQSFAIHDIKNYEKFSNAGLFYTSPTEITCYCCGMKFCNWLYEKHPLQVHAFWSRNCGFMRATLGIIGLKKMIDSYNDYYNNEVFVKHQNRVYTHKRLEDMGFSKPFMRFILANAFIPPYRKYIHKIILNERYFTFKFAAHLLSFHKVNLDNQTTYCMTCGIEPIKKDENFCNACKTLNYKHYKTLNFSVKL

SEQ ID NO: 291 - protein, 50 aa, African swine fever virus
MSGFMNSLRKCIGNINSHLEGFMRTYLLRIIRKIKPTTQPSIEDDHYKCL

SEQ ID NO: 292 - protein, 104 aa, African swine fever virus
MSTKKKPTITKQELYSLVAADTQLNKALIERIFTSQQKIIQNALKHNQEVIIPPGIKFTVVTVKAKPARQGHNPATGEPIQIKAKPEHKAVKIRALKPVHDMLN

SEQ ID NO: 293 - protein, 236 aa, African swine fever virus
MRGILIAIEGINGVGKSTQAMKLKETLECMDYNAICIHFPNPDTTTGDLILQVLNKTIEMSSEQLHKLFTKHRSEFIAEIAVLLKLNYIVIVDRYIWSGLVYAQADGITIETKNTFKPDYTFFLSSKKPLNEKPLTLQRLFETKEKQETIFTNFTIIMDDVPKNRFCIIPATLNKEIIHMIILTKTLKVFDNNSCLNYIKMYDDKYLNVQDLNLFDFDWQKYIEDNNDKEEYDFIV

SEQ ID NO: 294 - protein, 60 aa, African swine fever virus
MHSNVSFNFIACVLFPTPLIPSMAMSIPRMINKRKKRIQFLTFLTNLFLYNIVQHCISGI

SEQ ID NO: 295 - protein, 158 aa, African swine fever virus
MNKKIIVMMALLHKEKLIECIYHELENGGTILLLTKNIVVSEISYIGNTYKYFTFNDNHDLISKEDLKGATSKNIAKMIYNWIIKNPQNNKIWSGEPRTQIYFENDLYHTNYNHKCIKDFWNVSTSVGPHIFNDRSIWCTKCTSFYPFTNIMSPNIFQ

SEQ ID NO: 296 - protein, 289 aa, African swine fever virus
MNKIFLNITETINMVLIEFLTGFFYLYGKRLFSISKVMDMICLDYYTIIPAPLAMMLAARLKNYDLMKRLHEWEISIDYALLVVDDVPSIDYCLSLGARSPTRAQKRELLRDNTFNPVYKYLMNCSGFPTKREKNIPCDVQCERLQKNIIKELVFNCSVLLEMVLHTEREYAYALHCAAKHNQLPILMYCWQQSTDAESILLKTCCSDKNINCFNYCILYGGAQNLDAAMVEAAKHDARMLINYCVMLGGRSLNEAKETAAMFGHIECAQHCFKLQSYVVDTSNTDDTD

SEQ ID NO: 297 - protein, 226 aa, African swine fever virus
MFPEREIENLFVKWIKKHIRNGNLTLFEEFFKTDPWIVNRCDKNGSSVFMWICIYGRIDFLKFLFEQESYPGEIINPHRRDKDGNSALHYLAEKKNHLILEGVLGYFGKNGTRICLPNFNGMTPVMKAAIRGRSLNMLSLIKFGADPTQKDYHRGFTAWDWAVFTGNMELVKSLNHDYQNLSTCISLFTSWMFSTGGLRKSPKLLLLAVNIMSMKNFLNRIQSSCV

SEQ ID NO: 298 - protein, 858 aa, African swine fever virus
MCAGFYVAVHPWLEAQSLHKVGHTGNLAARLHDGSYTTCFTDEWKYCFTLETSTKKDAQKIEAGVLYCAQFFRVKNKELVCLLPEKIKQLAEDVANCLDISYTLCDSPAYEMNDSTIVVEPSLPSDPLISKEKLRHLVITPVEDEHFADDVLFFSTDETRTAIEDRLYQKEAANMGYQELRRSGRAILQMACRCGKTRVAYLILSNYLQGKVLYLVPGLSLLRQTLEKLYQYGISLKNVLLVGSDQTRIVLNHDNIEMTTNPVFIAKRIREAPSLLVIATYQSSTLLVDDFDLIISDECHRICGEWETRPFTHVLLNFKKGHRLFLTATPRYDTPLSMKNRELFGGVAFRYYLREGIEAGYVNDFELQMVAAPKLAHQPSTKEETTKQIIVKQIIMALAYLKTNIPAPKMLVFTRDIKQAKELYAALVDQGVYALIAHSTLPRQVILKTFTEFCSSKEPVILLNCRLFQEGVEVPELNAVFFAAPRHSPRDIIQSICRPLNKQVQKPHATIFLPLEVNTENVCLDRFSSIIPFADALASEDPRFYEHLLNPSEVAYPINWIGAHGSVSELLQLARHAIRYGTQGKIDRLTRSERLPWKAAFAELKRTVEICCRYPKINDGFHFGGATLRFDTWYKWVIKSYLQYKNKEPSSLEPYQVSDLESLQDWTTRGVGGPYPWEESMAFLETWLAQNKGELVAIDIHQGGWIGLDATPMERLSGVLTTVSQRDGRSYGKNKKLRPKKGFMIPPQQAQDLDRIFGKHNLKWRKDRVNGFLKEDEHGNYTGEPTCIQEAYRTFKEYVKTNPEYIEKYWPGYAKGKHKHQELPHIWEKGLAPPRYKAFKDGNKQLIQRSPKKKDIKN

SEQ ID NO: 299 - protein, 179 aa, African swine fever virus
MEGEELIYHNIINEILVGYIKYYINDISEHELSPYQQQIKKILTYYDECLNKQVTITFSLTSVQEIKTQFTGVVTELFKDLINWGRICGFIVFSAKMAKYCKDANNHLESTVITTAYNFMKHNLLPWMISHGGQEEFLAFSLHSDMYSVIFNIKYFLSKFCNHMFFRSCVQLLRNCNLI

SEQ ID NO: 300 - protein, 137 aa, African swine fever virus
MEAVLTKLDQEEKKALQNFHRCAWEETKNIINDFLEIPEERCTYKFNSYTKKMELLFTPEFHTAWHEVPECREFILNFLRLISGHRVVLKGPTFVFTKEIKNLGIPSTINVDFQANIENMDDLQKGNLIGKMNIKEG

SEQ ID NO: 301 - protein, 317 aa, African swine fever virus
MVETQMDKLGFLLNHIGKQVTTKVLSNAHITQTMKEIILENHSVDGGAAKNVSKGKSSPKEKKHWTEFESWEQLSKSKRSFKEYWAERNEIVNTLLLNWDNVRGAIKKFLDDDREWCGRINMINGVPEIVEIIPSPYRAGENIYFGSEAMMPADIYSRVANKPAMFVFHTHPNLGSCCGGMPSICDISTTLRYLLMGWTAGHLIISSNQVGMLTVDKRIIVDLWANENPRWLMAQKILDIFMMLTSRRSLVNPWTLRDLKKILQDYGIEYIIFPSNDFFIYEDERLLMFSKKWTNFFTLHELLDDLETIETKASSTT

SEQ ID NO: 302 - protein, 334 aa, African swine fever virus
MLIFISNMEELLIENSQRFTIFPIQHPECWNWYKKLESLTWTAQEVDMCKDIDDWEAMPKPQREFYKQILAFFVVADEIVIENLLTNFMREIKVKEVLYFYTMQAAQECVHSEAYSIQVKTLIPDEKEQQRIFSGIEKHPIIKKMAQWVRQWMDPDRNTLGERLVGFAAVEGILFQNHFVAIQFLKEQNIMPGLVSYNEFISRDEGMHCSFACFLISNYVYNIPEEKIIHKILKEAVELVDEFINYAFDKARGRVPGFSKEMLFQYIRYFTDNLCFMMQCKSIYKVGNPFPQMTKFFLNEVEKTNFFELRPTQYQNCVKDDAFAFKLFLNDDDF

SEQ ID NO: 303 - protein, 778 aa, African swine fever virus
METFFIETLASDVYGKALNVDLDRLSQAQVKYTLQELISYCSALTILHYDYSTLAARLSVYQLHQSTASSFSKAVRLQAAQSCSRLSPQFVDVVYKYKAIFDSYIDYSRDYKLSLLGIETMKNSYLLKNKDGVIMERPQDAYMRVAIMIYGMGRVVNMKMILLTYDLLSQHVITHASPTMFNAGTKKPQLSSCFLLNVNDNLENLYDMVKTAGIISGGGGGIGLCLSGIRAKNSFISGSGLKSNGIQNYIVLQNASQCYANQGGLRPGAYAVYLELWHQDIFTFLQMPRLKGQMAEQRLNAPNLKYGLWVPDLFMEILEDQIHNRGDGKWYLFSPDQAPNLHKVFDLERSQHENAHREFKKLYYQYVAEKRYTGVTTAKEIIKEWFKTVVQVGNPYIGFKDAINRKSNLSHVGTITNSNLCIEVTIPCWEGDKAEQGVCNLAAVNLAAFIRENGYDYRGLIEASGNVTENLDNIIDNGYYPTEATRRSNMRHRPIGIGVFGLADVFASLKMKFGSPEAIAMDEAIHAALYYGAMRRSIELAKEKGSHPSFPGSAASKGLLQPDLWVRCGDLVSSWEERVAQTTQGVLTPKRWSQLRLAAMQGLRNGYVTALMPTATSSNSTGKNECFEPFTSNLYTRRTLSGEFIVLNKYLIDDLKEINLWTEAIQQQLLNAGGSIQHILDIPAEIRDRYKTSREMNQKILTKHAAARNPFVSQSMSLNYYFYEPELSQVLTVLVLGWKKGLTTGSYYCHFSPGAGTQKKIIRNSEKACNADCEACLL

SEQ ID NO: 304 - protein, 165 aa, African swine fever virus
MVNPNKRIMNKKSKQASISSILNFFFFYIMEYFVAVDNETSLGVFTSIEQCEETMKQYPGLHYVVFKYMCPADAENTDVVYLIPSLTLHTPMFVDHCPNRTKQARHVLKKINLVFEEESIENWKVSVNTVFPHVHNRLSAPKLSIDEANEAVEKFLIQAGRLMSL

SEQ ID NO: 305 - protein, 1048 aa, African swine fever virus
MQETFKFLRCNSQGEAVEDKYSLETLKNHFVVRDEYNNLFRVFSSRDDFWEWEAAQPFEQKCFHEVVFGFLPQRLKFDIDFPVNKSYSDDNVDDNDNVEDNVYDILDMIINVIMDVFYETYSLPYNINLTREQILLTDSIGLNKKRELKYSFHIILYTYSVLNNNEAKVFTSKVLENLPKHVYPFVDPQVNKSIQNFRIIGSHKKGSMRVKMFNEELAEVFETSTTTKKSDTLIATPFETTCLPCIFTNVKETTPSSCDTIQQSELEEVLKFAGTLCKNHCFLRVHKNLVLFKRTSPSYCEICKRMHDKDNTLILRVTGNKVYQHCRHDNKHSLLMGSLSGTNNFVETYVDQVMTKSIEVHESILFEELPDTQKHIYDESSMREYERVPTLVVKAQMKIGKTVQLRNYLQKYYGNNSISKQQTIRFVTFRQIFSKNIQSRLPNFTLYSEVTGDLDSYERVIIQVESLFRLTSTAEPVDLLILDEVESIFNQFNSGLHKYFAPSFAIFMWMLETANYVICLDANLGNRTYNILQRFRGDVPIFFHWNQYKRAQHDTYYFTSSRETWLNNLLKDLLEDKKIVIPTNSLMEARLLQSFIQKKFPEKKIGFYSSKSTAHERESHFNNVSYYWGLVDILIYTPTISAGVSYEDKRFDVLYGFFNNMSCDVETCCQMLGRVRELKSKCYKICLQGKQNYYPETIEDIEMFTLQKRDTLFQTISNHQLSFTYSKETGRPIYYKTPYYHLWLETMRIQHLSKNHFITRFINQIADTGAKVFILTGEKLETVKQYTSIKMEIKHQDYVNIASAETIDANKALQIKQNLKEGITVDQQDLFAYEKYKLLEFYAWHGHKITPKFVEQYNSFMTKQNYTGRVQISRGKTVYESLTMLQTQELNFHQWAMQHAEHHDLQFNYSFQSHMYAIMLLTKCGFKCVQDPNILTNEQLMTKLVDEFVQYDLSAISFEFKLKKPNKTDPQTILKFINKVLGLRYGLKIHHNKGNYYIKNTKAGSLIPFVRQQIKQSPCVVSNLLPITETSSAKEETSPIKEETFTET

SEQ ID NO: 306 - protein, 205 aa, African swine fever virus
MVEPREQFFQDLLSAVDQQMDTVKNDIKDIMKEKTSFMVSFENFIERYDTMEKNIQDLQNKYEEMAANLMTVMTDTKIQLGAIIAQLEILMINGTPLPAKKTTIKEAMPLPSSNTNNEQTSPPASGKTSETPKKNPTNAMFFTRSEWASSNTFREKFLTPEIQAILDEQFANKTGIERLHAEGLYMWRTQFSDEQKKMVKEMMKK

SEQ ID NO: 307 - protein, 78 aa, African swine fever virus
MPTKAGTKSTANKKTTKGSSKSGSSRGHTGKTHASSSMHSGMLYKDMVNIARSRGIPIYQNGSRLTKSELEKKIKRSK

SEQ ID NO: 308 - protein, 196 aa, African swine fever virus
MNIIRKLKPGTISLVLGPMFAGKTTFLIHCIYMLERLEKKVVFIKSTKNTRDKTIKTHSGIQLRPKQCKIIESTQLSDVGSLTDIHAVVVDEAHFFDDLITCRTWAEEEKIIILAGLNASFEQKMFPPIVRIFPYCSWVKYIGRTCMKCNQHNACFNVRKNADKTLILAGGSELYVTCCNNCLKNTFIKQLQPIKY

SEQ ID NO: 309 - protein, 145 aa, African swine fever virus
MDHYLKKLQDIYTKLEGHPFLFSPSKTNEKEFITLLNQALASTQLYRSIQQLFLTMYKLDPIGFINYIKTSKQEYLCLLINPKLVTKFLKITSFKIYINFRLKTFYISPNKYNNFYTAPSEEKTNHLLKEEKTWAKIVEEGGEES

SEQ ID NO: 310 - protein, 422 aa, African swine fever virus
MYTHVDVVGIAEASAALYVQKDRDRYLDVLTTIENFIYQHKCIITGESAHLLFLKKNIYLYEFYSNNVAEHSKALATLLYKLDPEYLTRYTVLITKIPNHWYVINVDQREFVRLYAIPAVKQHLPIPILPFYCTSALTQQELFCLGPELQLIQIYSKLCNPNFVEEWPTLLDYEKSMRMLFLEQFPQRLEMTGGKKEEKEKHESIIKKIILEMVSTRQRIVVGGYIQKNLYNHVLKNRNRLQLITSLNIYEEKDIIQQFCDSNGLKIKIRINNPLLPTNPELRRLTIYFNHNNDDDQSYLIVDMYNTGSYELVPTNQINTLDGSFLIGTPFVQARFLLVEIWVLMLIAQQTKKDTKKIIQFFINQYEMLMNSPWPSMEALFPSSSKRYLGNYVDPNALIKWAQLKLKRIPPFYPGKPDEESC

SEQ ID NO: 311 - protein, 1242 aa, African swine fever virus
MEPLRPQITYGPIETVDNEELTEADMLSFISAAVNSTGLIGYNIKSFDDLMDNGIPQIVKQMFNVDITYKDQRDHTEIDKLRESVQIQFNFTDVNIERPQHRNYSQGNKINLLPNKARLCGLSYSGPVNLAAEVILTAHYSNGRQEVKRASIPPFQVSTFPIMRGSNRCHTHHLSKTAKKEIGEDPNEPGGYFIARGGEWVVDLLENIRFNTLHIHYHTMQQGNNEIIRGEFISQPGGAFENSSQIIIRYMTTGAITIEINSTKFSKLRIPWYLIFRMFGMTGDDSIIEQVVFDLESNSLVNTFMIEILEKSIHVLDPIFQPVQHELNREKIIQFLSEKVSKFVSNPSAYKSDENAVQYLNERQLTILDKILLPHMGQTADTRVRKLRFLGLLIHKILLVIMNVFPPTDRDSYRTKRVHGSGVSLAKAFKAIFNTSVIAPIINGFKELLKQTAFEELTQRNIIEAFSAALSKNTASDLNRSMEQSIISGNKTIMVRQRPIVNRVSTQSLERKNLLNTISALRTVNTHNTTNASKQTERADMMRRVHASYPGYICVAQSADTGEKVGMSKQLAITANVCTAGEVLSLKQRLLSDPAIQQLADVSNKDIVRKGLARVFINGEWIGCCTNAFELAQRYRMLRREGKVVHPHTTIYWDSMVDEVEFWLDVGRLTRPLLIVDNNIEKYNQACYKAAEARKKGDKDWEKHKIPFIQNTRFTPQMAKDILAGTLTLEDLVAQGICEFITPEEAENCLVAFSIIELRKHKHDVTRRFTHVDVPQAILGLAALVSPYANCTQPARVTYETNQGRQTGGWYCFSWPYRVDMNRFFQFYNEMPLVKTIAHNYVIPNGLNTIVAYMIYGGYNQEDSVIVSQSFIDRGGFAGTFYREEKVELESDIESFGKPDPLITKNLKPGANYEKLVDGFVPVGTVVKKGDIIIGKVAKIRGEKDELNKYIDRSVMYGFDEPAVVDAVMRPHGPNDEIFGLMRLRYERNLNIGDKMSSRSGNKGIAALALPTSDMPFTEDGLQPDLIVNPHSHPSRMTNGQMIETTVGLANALQGVVTDGTAFLPINVQLLSERLAQEGLRFNGCQKMFNGQTGEYFDAAIFIGPTYHQRLQKFVLDDRYAVASYGPTDALTGQPLDGKRSHGGLRLGEMEHWVLTAQGAMQTIIEKSHDDSDGCISYICRNCGEPAIYNASHPIYKCMNCDVQADIGMVDSRRSSIVFQHEMRAANVNITSVLSPRVFQPA

SEQ ID NO: 312 - protein, 84 aa, African swine fever virus
MPYARDITKFITATEPEVGLPLLALQRSKSIIGVILLVISLLFIFIGIIILSVSSGHTTAASIFIVLSLILGGGGFFLIYKDNS

SEQ ID NO: 313 - protein, 418 aa, African swine fever virus
MSNYYYYYGGGRYDWLKTVEPTNFLKIGLPYQAHPLHLQHQATTPPSILEKFKRADILLNEVKAEMDPLMLQPETEKKLFQILSSIDMFKGLRKKVEFTYNAQIVTNAWLKMYELLNTMNFNNTSQAFCNCELPGGFISAINHFNYTMMHYPTFNWVASSLYPSSETDALEDHYGLYQCNPDNWLMQSPLLKKNIDYNNGDVTIASNVKNLALRATQRLTPIHLYTADGGINVGHDYNKQEELNLKLHFGQALTGLLSLSKGGNMILKHYTLNHAFTLSLICVFSHFFEELYITKPTSSRPTNSETYIVGKNRLRLFTPKEEQVLLKRLEFFNDTPLVDLSLYQNLLESVYFAVETIHLKQQIEFLNFGMKCYRHFYNKIKLLNDYLAPKKKIFQDRWRVLNKLYVLEKKHKLKLCAS

SEQ ID NO: 314 - protein, 152 aa, African swine fever virus
MYSILIACLVLLLCLVIYVGHRADHARKYLEGMWHGDPVFLKQSGLQSFYLYIQPDHTCFFSIVNKNGEKLMETKIPCTITNKIYMFFKPIFEFHVVMEDIHSYFPKQFNFLLDSTEGKLILENNHVIYAVLYKDNFATALGKTVEKYITQN

SEQ ID NO: 315 - protein, 158 aa, African swine fever virus
MFSNKKYIGLINKKEGLKKKIDDYSILIIGILIGTNILSLIINIIGEINKPICYQNDDKIFYCPKDWVGYNNVCYYFGNEEKNYNNASNYCKQLNSTLTNNNTILVNLTKTLNLTKTYNHESNYWVNYSLIKNESVLLRDSGYYKKQKHVSLLYICSK

SEQ ID NO: 316 - protein, 360 aa, African swine fever virus
MIILIFLIFSNIVLSIDYWVSFNKTIILDSNITNDNNDINGVSWNFFNNSFNTLATCGKAGNFCECSNYSTSIYNITNNCSLTIFPHNDVFDTTYQVVWNQIINYTIKLLTPATPPNITYNCTNFLITCKKNNGTNTNIYLNINDTFVKYTNESILEYNWNNSNINNFTATCIINNTISTSNETTLINCTYLTLSSNYFYTFFKLYYIPLSIIIGITISILLISIITFLSLRKRKKHVEEIESPPPESNEEEQCQHDDTTSIHEPSPREPLLPKPYSRYQYNTPIYYMRPSTQPLNPFPLPKPCPPPKPCPPPKPCPPPKPCPSAESYSPPKPLPSIPLLPNIPPLSTQNISLIHVDRII

SEQ ID NO: 317 - protein, 369 aa, African swine fever virus
MYFLVADHREHHVIPFLKTDFHHMHQNPIQKNQALLEIKQLFTGDYLICKSPSTILACIERKTYKDFAASLKDGRYKNRQKMLSLREQTNCQLYFFVEGPAFPNPQKKINHVAYASIITAMTHLMVRDHIFVIQTKNEAHSSQKLVQLFYAFSKEMVCVVPTSLTPTDEELCIKLWSSLSGISGVIGKILANTCSVAHLVHGKLSSQNIDQLKTPSNRPFPKKVKRMLISISKGNKELEIKLLSGVPNIGKKLAAEILKDHALLFFLNQPVECLANIQIVQKTRTIKLGMKRAEAIHYFLNWCGSAHVTDDSQNITEASRSTMQVATQSAAIQPAATQPLHEVSDDASSDASSPVGYQTLSKEMLLNTA

SEQ ID NO: 318 - protein, 1249 aa, African swine fever virus
MEEVITIAQIVHRGTDILSLNNEEIEALVDEIYSTLKGSNDIKNIRLIDFLFTLKDFVNHVRAEQSKLPDLSMPIEAYIRQLLVDPDVVPIVSEKKKELRVRPSTRKEIFLINGTHLAVPAEAPIEIYGLKLRLKTFSPQCFMRMAEIGSFSPETLGYVASGANLTNFIRVFMKCVDQETWKKNGEGVVVTTKENIIQFTHQYIELYKFLRSGGHSWLINRLAEEMVHRKLDREDQGSHISNIVETEEIEPEENIKRVIFFLKELSTMYSVSPVFTSGYMPLLYDLYRAGYLEVLWNPVEQKFLQHAEQREKEQMILQQVDMKLTEVITQARQYFKIMEEKIGRVQSDAIREILTMEGKVDDPNSILQEVIKACGKQEAELITTEYLNIKKQWELQEKNACAHLKLVKQLRSGLQYAELLKVLESIRVLYKEKNNTTNWNLCKACGFKLLCPHVDMLIQLQAAEASYDTMRTKLMKFSGINKEKENNQGLIYSYFCKICGEELAHFIQEDRTADVGIIGDLNSKLRVFIWQETMKACTFIHFGKLVDVKQFANIAVNVCLPLVYSIENIKKEEDYDPLTQLYAVIYIYAYILNLIYSSQKNKEFLTITIHGMKADSSLNAYVTFLLEKMMQQYSGIINQLSEITDQWIANNFREAFKKIIHQNGLQGLSVQDDTKVLLTEILLDPMYDYAATVARIDGSIPMHKPRTPKEAEYEFKTVIGRTPAELLSQKEFYDKIYTSKYRPDFTQLTRLNDIYFQEESLRVWWGGRDEEKTSTLIYLRAYELFLKYLQNAPNFNSELAEFKTYENAYGEQKALLAQQGFYNIFDPNTGRADQRTRLFEYKRLPISTLYDERGLPHKWTIYVYKAVDSSQKPAEIEVTRKDVIKKIDNHYALADLRCSVCHVLQHEVGQLNIKKVQTALKASLEFNTFYAFYESRCPKGGLHDFQDKKCVKCGLFTYIIYDHLSQPELVHDYYNNYKDQYDKEKMSIRSIQIKKDMTTPSTETQPKPPQEPWTFDYGKIIKTAKILDISPAVIEAIGAMEGRSYADIREGQGAPPPPTSMDDPRLMAVDSAVRIFLYNYNCLRHVSTFNKPPIHVERLVKHLSYEEKEDLEKVLPNVVNEYHTTFKHLRVTDPASALLYSIEFLCISFLTLYEIKEPSWVVNIVREFALTELNTIIQSEKLLSKPGAFNFMIFGEDFVCSGEDSSMDDISAYSSPGLFGEDIIDRLDDPFSIEDVDISLDVLDNLAPQ

SEQ ID NO: 319 - protein, 448 aa, African swine fever virus
MSNESFPETLENLLSMLQTKQQNAIQSEVIEWLHSFCETFHLKIHCHKQFIPSGEKKRAKIPAQETQGNTQPSHHVYRVVLSRAQPVKAQESLLTTMCNGLVLDANTWTCLAIPPPAPFQQATRQVQHFYRNNFYEVVPIQDGTLLTIYHWDDPEYGPSWCLASTHGYDVSNYCWIGDKTFAELVYELLQQHSTCDVTLEKNKTRGTRLFFDNLNPDYCYTIGIRHHNLQPLIYDPQNIWAIQSTNLKTLKTVYPEYYGYIGIPGIQSQVPELPQYDLPYLIRSYKTAMNQAKNAIKNGKKDKGYFNYGYLLISRAPAITKSTSNVLLKSPLLVFLQKSVYQKKHNISNSQRLEFIILQNYLMQHFRDHFIALFPQYISYYTKYQNMLNMIIHSIATKDKDHPFAGAVVKKVLEDIENAENIIDHTTIQNYAHQSKYAMLYLSIISHF

SEQ ID NO: 320 - protein, 129 aa, African swine fever virus
MEHPSTNYTPEQQHEKLKHYVLIPKHLWSYIKYGTHVRYYTTQNVFRVGGFVLQNPYEAVIKNEVKTAIRLQNSFNTKAKGHVTWAVPYDNISKLYAKPDAIMLTIQENVEKALHALNQNVLTLASKIR

SEQ ID NO: 321 - protein, 79 aa, African swine fever virus
MDQEQLFDKLYSLNLQLTAKNDQKKENRFFIRSGKKIQRIQMMMFITVYDINQKQKKRYGLRGCNLNLKATVLPLHKRI

SEQ ID NO: 322 - protein, 717 aa, African swine fever virus
MTKLAQWMFEQYVKDLNLKNRGSPSFRKWLTLQPSLLRYSGVMRANAFDILKYGYPMQQSGYTVATLEIHFKNIRSSFANIYWNRDSEEPEYVCCCATYQSHDGEYRYRFVWYQPFIEAYNAIEAALDPLETIILNLIAARDLDFVVHIFPYNKGHEDYLASTQLILKIFIATLLMDILRIKDNTLDVHLNSDYIIVMERLWPHIKDAIEHFFEAHKDLLGYLIAFRNGGNFAGSLRPSCGQKIVPLTIREVLQMNDINLAVWREVFIMQECSDLVINGIAPCFPIFNTWTYLQGINQIFFENTSLQEKFKKDFIARELSKEIIKGQKTLNDKEFKKLSLHQIQYMESFLLMSDVAIMITTEYVGYTLQSLPGIISRSSYLSPIVKNILMDEDSFMSLLFDLCYGAYVLHKKENVIHADLHLNNMTYYHFNPTSFTDRNKPGKYTLKVKNPVIAFITGPKVETETYVFKHIDGFGCIIDFSRAIMGPNHAIKLERQYGLAFVNTFYRNQSEHILKVLRYYFPEMLTNRENEIQGVILSNFNFFFNSITAIDFYAIARNLRSMLSLDYLHTSEVKRNVEISQTFLDTCQFLEEKAVEFLFKNLHTVLSGKPVEKTAGDVLLPIVFKKFLYPNIPKNILRSFTVIDVYNYNNIKRYSGKAIQTFPPWAQTKEILTHAEGRTFEDIFPRGELVFKKAYAENNHLDKILQRIREQLANENL

SEQ ID NO: 323 - protein, 105 aa, African swine fever virus
MKICKACSSCMVRTYVDGNIIFRCSCGESVQGDSQNLLVSSKVYHTGEMEDKYKIFIKNAPFDPTNCQIKKDCPNCHLDYLTQICIGSQKIIILVCRCGYMSNRG

SEQ ID NO: 324 - protein, 257 aa, African swine fever virus
MYSVCDVVRDAVAQSHLCACPNDKLPQCKGVTKAPPKCSVFHVAKLQDTKFKWKYTLDPLKAQKLSQIDKDIEKDAITLKLIYGIELSPEDLEWWKMQRCLINKKTGAKGGQFANKYLERQDLELLGYSPTPIIGGDFMFTALPDKVLRTIPVAWDRFLNPAMMIFFLIILLCVILGIFYVLVRNTLRRKQKSKQHQMEIKRFIKEKEQDPYIHTSFESWPADPNKEWKDLIPVYEAQGYCMADYRKKLGMPPGPNC

SEQ ID NO: 325 - protein, 475 aa, African swine fever virus
MTSLLKTDFNVSKYRLIAQKREANAVEIEAALEVVREFIIKKKLILYGGIAIDYALHLKGSSIYPEGERPDFDMFSPNHVEDAYELADILYEKGFKQVGTVRAIHVQTMRVRTDFVWVADLSYMPPNIFNTIPTLTYKNLKIIHPDYQRAGLHLAFCFPFDNPPREDVFSRFKKDLQRYNLIEKYYPIPVVPVKSTYESKTFSIPFKQVAIHGFAAYALLYQTLNELRITCKVPEWKTEFPQPSYSYHKNDKNITLTVDMPKAYPALVLATYNPEEVIKEMGLHLTEICEPYMDYSPPIFKTNDIHFFSTMFKELAISIIQDNLIVVSPQYLLLYFLYGAFATPADKSLFLFYYNATLWILEKADSLLNIIQKQTSPEEFTRFANTSPFVLTTRVLSCSQERCTFSPAYRISLANDVQQSQLPLPKTHFLSNSLPDVSTLPYNYYPGKGKDRPTNFSYEKNLLFNIGGKCTPSAM

SEQ ID NO: 326 - protein, 315 aa, African swine fever virus
MDALLKEIEKLSQPSLQKENNDVCDLCFMQMKKISNYQLLCEECGQLKDWFEPEYNEKFTVYSRLKIVGANSSYHQRDLDKANSSDYSSLQFHHILEELKSLNVKYMDAGQKPFPIQVLKETAHSYNQVQQHRVIRSITKLQILASILRSICLKLNIACTVADAARFTQLNTKGISRGMDLLRSLFVDNKITLNVDLNPIDSFINSTYSALQIKQIHQELQEENVYNLKEIVKSFILYADEKNIGVDLNRRTVVIATMYNVLRRAYYPIEIDTVVYQCKIRKNTITRALKMYEDYYSHFKSLYEQYHLNAAKKLI

SEQ ID NO: 327 - protein, 147 aa, African swine fever virus
MADNDNEDLIMDDLVEEYVETEEENLVDSEEESEDKDEIVESPSICEGFVQASSQTLVIIPDNERITSNVLTTFEATRLVAVRAQQLAINGSTMLKKKYSSPIDIAKQELFNRKIPLLVMRCIKVTPEGQKIVEIWNPREMGIPLLD

SEQ ID NO: 328 - protein, 62 aa, African swine fever virus
MNWGSISSGTPGLFVESIRNTPSVVKINVIFLKVISNTAVSVFWRDRRIRFESDWLNSYFQK

SEQ ID NO: 329 - protein, 962 aa, African swine fever virus
MREESWEDHDTIQLTAQRKYLAEVQALETLLTRELSVFLTEPGSKKTNIINRITGKTYALPSTELLRLYEHLEQCRKQGALMYFLERQGTYSGLMLDYDLKLNTNAVPPLEPPALSRLCHRIFVHIKNSSVLPEGSHKIHFFFTLKPEVVQGKYGFHVLIPGLKLAASTKKSIIGSLQHDATVQKILHEQGVTNPESCLDPHSASVPSLLYGSSKLNHKPYQLKTGFELVFDSSDPDYIPIHQIKNLESYNLVSELSLTNEQGSLVRPVYCAADIAAEKEEEIPTEDHSLSILMLHDPEARYLHKILNLLPPEYYVEYPLWSNVVFALANTSANYRPLAEWFSQKCPEKWNTGGKEKLEKLWNDASHHTEKKITKRSIMYWAHKHAPQQYKEIVEQGYFSILAEYVYSYNGMLEHYMIAKVIYAMMGNKFVVDVDSNGKYVWFEFVLPGQPMNQGEIWKWRKEVNPDELHIYISENFSRVMDRITEHIKYHLSQPHESNILNYYKKLLKAFERSKSKIFNDSFKKGVIRQAEFLFRQRSFIQTLDTNPHLLGVGNGVLSIETIPAKLINHFHEHPIHQYTHICYVPFNPENPWTKLLLNALQDIIPELDARLWIMFYLSTAIFRGLKEALMLLWLGGGCNGKTFLMRLVAMVLGDHYASKLNISLLTSCRETAEKPNSAFMRLKGRGYGYFEETNKSEVLNTSRLKEMVNPGDVTARELNQKQESFQMTATMVAASNYNFIIDTTDHGTWRRLRHYRSKVKFCHNPDPSNPYEKKEDPRFIHEYIMDPDCQNAFFSILVYFWEKLQKEYNGQIKKVFCPTIESETEAYRKSQDTLHRFITERVVESPSAETVYNLSEVVTAYAEWYNTNINVKRHIALELSQELENSVLEKYLQWSPNKTRILKGCRILHKFETLQPGESYIGVSTAGTLLNTPICEPKNKWWEWSPNPSAPPEKEASAPTP

SEQ ID NO: 330 - protein, 52 aa, African swine fever virus
MKKKDAYEQAKAYNILNVAFLLPVMALPKDMLLRIFPKELVQTLLSQEGQRD

SEQ ID NO: 331 - protein, 962 aa, African swine fever virus
MGKPTLLEPGHLYNVPAEHKNDVPIHYIITWIKQRLPEFGGAIPTSLADRVLIIKSRTGSGKSTALPVHVFRILRNENTHSFQKYLGRSVICTQPRVLTAVTLAKDIGASTHYPDMILGQTVGYQTKPLTEKPNRGLIYATAGVLLAQLHTMTDDEIASRYAFMIIDEAHERALGIDLMLMYIKSMLQRMLQRGSIGALRIPFVILTSATIDTHKYSTYFGIGKENIILVEGRQYGVETHWPLYNTNNYIKTACETALTIHKENIHDRPTEADILIFMPGMAEIRFLSMLLNNANMDLAKEKLPLMLILPIDSEAIAQENEAYLGLKAEIKNLWVKNPLTAKVEKPLRRVIVSTVVAETGLTIETLKYVIDPGWNRSIETYYPEWAGGLITRPAAQSRIEQRKGRVGRVFPGHFYPLYTKHVFEQIPVQQYPEIITEGPGAIFLSIVVETIKKNKEGVFKAEEIDMLDPPPTDALASAIERAIVAGLLTRGEKGLQLTQLGDIASRFSFLSIEEARMCFSGYFWQAAISDIATILAVVSVADKKLTNLLDSKQRNGAMLAEAVLAGIPPFLQNIDNAYTNIHLLLADDLLEGLFIFEGFQHAIVYFINNKVNNVAKHLREWCEKKMLKYSSMVQILARREDILNELAIVGLNPFHQWQNRLASANAETFLKRVCTLKQCMYEAYRLNCFCYDEHRLLYTGRNGIHFSYHDAVIKNPSCIVTPRIMLSPVSKQYMEWRLEPSFVSVLDGFVNVDINFLLPRQEIPNILGGVENEEEEPPLPIQVFLHKYVKTHFHFSGKSFKELKMKPSQMIKFPETTLINMIPDIPKNVVQTYLEINVCHRYSFKRLIYCETFYTDMDDVQHENSVELIGLPMAAHHLTINDFNKLYHLLKPDGFLIMYDLHQGQEAFWLHSLQDALGHHTIRRDMDFHTIPEWETIFKECGFTPIFSKQPSEHELFIVFKK

SEQ ID NO: 332 - protein, 119 aa, African swine fever virus
MLHWGPKYWRSLHLYAIFFSDAPSWKEKYEAIQWILNFIESLPCTRCQHHAFSYLTKNPLTLNNSEDFQYWTFAFHNNVNNRLNKKIISWSEYKNIYEQSILKTIEYGKTDFIGAWSSL

SEQ ID NO: 333 - protein, 318 aa, African swine fever virus
MLHLIYISIIVVLIIILISYTRKPKYFRITAPRSVALFHGIHPLNPKNYKTFSEEFETILNNAIEDGDFKGQLTEPCSYALRGGKYIRPIILMEIVRACQLQHSFGAPIYPAEAALAAEYFHVASLIIDDMPSFDNDVKRRNKDTVWARFGVAKAQMSALALTMQGFQNICRQIDWIKEHCPRFPDPNQLGALLCTFVSHSLNSAGSGQLVDTPEKTIPFFKIAFIMGWVLGTGSVEDIGMIERAAHCFGHAFQLADDIKDHDTDTGWNYAKIHGKQKTFDDVAQSLQECKKILHGKKIFTSIWNEIFQKVINVALGT

SEQ ID NO: 334 - protein, 438 aa, African swine fever virus
MYHDYASKLLADYRSDPPLWESDLPRHNRYSDNILNSRYCGNKNGAAPVYNEYTNSPEKAEKGLQLSDLRNFSFMLNPQHKNIGYGDAQDLEPYSSIPKNKLFNHFKNHRPAFSTHTENLIRRNVVRTEKKTFPQVASLKGTQKNCLTQPSSLPSLKNPKNSSVPSTRFSEHTKFFSYEDLPKLRTKGTIKHEQHLGDQMPGQHYNGYIPHKDVYNILCLAHNLPASVEKGIAGRGIPLGNPHVKPNIEQELIKSTSTYTDVPMLGPLPPKDSQHGREYQEFSANRHMLQVSNILHSVFANHSIKPQILEDIPVLNAQLTSIKPVSPFLNKAYQTHYMENIVTLVPRFKSIANYSSPIPNYSKRNSGQAEYFDTSKQTISRHNNYIPKYTGGIGDSKLDSTFPKDFNASSVPLTSAEKDHSLRGDNSACCISSISPSL

SEQ ID NO: 335 - protein, 164 aa, African swine fever virus
MNVDFIAGINNLGEKIYTCEPFKTSFQNPFIVALIITAVVLVVFFAICNPPVDKKRKTKTAIYVYICIVALLFLHYYVLNHQLNDIYNKSNMDVIVSSIHDKYKGGDEIIPPISPPSVSNELEEDQPKKIPAGPKPADSKPVSLPDSKPLVPLQEVIMPSQYNN

SEQ ID NO: 336 - protein, 475 aa, African swine fever virus
MDQEESHVISIFETLGAYFINIFYNFLYKNALYKKHSIVTEYQYQVKGYILGVKQNKKLYEKMLDSFYKYFCNITQINSKTLNFSNFVTTIVDSFIPKEYSQSISLEKKESILELLLCDYISNLGTFITTEKMLPFIIKNRKENYHKVTKEMQDYSLTFLLKKRMELYNKFLRKQAYVEPETELEETYARLSSYNRSLLHQIEELTSENKSLLADLSTLRKKYEKRQSEYRRLVQLLYQQIQRSSTSKSSYPLTKFIETLPSEHFSNEEYQKETPADQKEVVEMELLRKQELLTSQELTSKSPNNYPVPHSRTIVSKPLDNYPVPRSRTTTKIDFDNSLQNQELHTKNGFSEKDIVEFGQDKPEEENILAIDQDKPEEETILAIKQDISEEDNIFAIDQDKPEFNQDTPEFKEAVLDIKENILEEENQDEPIVQNPFLENFWKPEQKTFNQSGLFEESSNFSNDWSGGDVTLNFS

SEQ ID NO: 337 - protein, 354 aa, African swine fever virus
MALTTHSGKLIPELQFKAHHFIDKTTVLYGPSKTGKTVYVKHIMKILQPHIEQILVVAPSEPSNRSYEGFVHPTLIHYRLWLADKQKKNDNKGAERFLEAIWQRQTMMSSIYSRVNNIDMLKTLYHKLPIDIQQKENKNIAKVECLKAEQTDQKKEEKITSLYQQLLKKIIIQNIHMYKNLCLTEDEKFTLNYINLNPRLLLILDDCAAELHPLFTKEIFKKFFYQNRHCFISMIICCQDDTDLPANLRKNAFVSIFTNASICMSNFSRQSNRYSKQDKEYVEEISHIVFKGYRKLVYIREDEHRQHFYHSTVPLPTAFSFGSKALLKLCKAVYSKEVVIDKSNPYWSKFRLNF

SEQ ID NO: 338 - protein, 530 aa, African swine fever virus
MAEFNIDELLKNVLEDPSTEISEETLKQLYQRTNPYKQFKNDSRVAFCSFTNLREQYIRRLIMTSFIGYVFKALQEWMPSYSKPTHTTKTLLSELITLVDTLKQETNDVPSESVVNTILSIADSCKTQTQKSKEAKTTIDSFLREHFVFDPNLHAQSAYTCADTNVDTCASMCADTNVDTCASMCADTNVDTCASTCTSTEYTDLADPERIPLHIMQKTLNVPNELQADIDAITQTPQGYRAAAHILQNIELHQSIKHMLENPRAFKPILFNTKITRYLSQHIPPQDTFYKWNYYIEDNYEELRAATESIYPEKPDLEFAFIIYDVVDSSNQQKVDEFYYKYKDQIFSEVSSIQLGNWTLLGSFKANRERYNYFNQNNEIIKRILDRHEEDLKIGKEILRNTIYHKKAKNIQETGPDAPGLSIYNSTFHTDSGIKGLLSFKELKNLEKASGNIKKAREYDFIDDCEEKIKQLLSKENLTPDEESELIKTKKQLDNALEMLNVPDDTIRVDMWVNNNNKLEKEILYTKAEL

SEQ ID NO: 339 - protein, 385 aa, African swine fever virus
MDEIINKYQAVEKLFKEIQQGLAAYDQYKTLISEMMHYNNHIKQEYFNFLMIISPYLIRAHSGETLRNKVNNEIKRLILVENINTKISKTLVSVNFLLQKKLSTDGVKTKNMWCTNNPMLQVKTAHNLFKQLCDTQSKTQWVQTLKYKECKYCHTDMVFNTTQFGLQCPNCGCIQELMGTIFDETHFYNHDGQKAKSGIFNPNRHYRFWIEHILGRNPEQELGTKQDPCGTKVLQQLKKIIKRDNKCIALLTVENIRKMLKEINRTDLNNCVSLILRKLTGVGPPQISESILLRGEYIFTEAIKIREKVCKKGRINRNYYPYYIYKIFDAILPPNDTTNRRILQYIHLQGNDTLANNDSEWESICMELPEIKWKPTDRTHCVHFF

SEQ ID NO: 340 - protein, 646 aa, African swine fever virus
MASGGAFCLIANDGKADKIILAQDLLNSRISNIKNVNKSYGKPDPEPTLSQIEETHLVHFNAHFKPYVPVGFEYNKVRPHTGTPTLGNKLTFGIPQYGDFFHDMVGHHILGACHSSWQDAPIQGTSQMGAHGQLQTFPRNGYDWDNQTPLEGAVYTLVDPFGRPIVPGTKNAYRNLVYYCEYPGERLYENVRFDVNGNSLDEYSSDVTTLVRKFCIPGDKMTGYKHLVGQEVSVEGTSGPLLCNIHDLHKPHQSKPILTDENDTQRTCSHTNPKFLSQHFPENSHNIQTAGKQDITPITDATYLDIRRNVHYSCNGPQTPKYYQPPLALWIKLRFWFNENVNLAIPSVSIPFGERFITIKLASQKDLVNEFPGLFVRQSRFIAGRPSRRNIRFKPWFIPGVINEISLTNNELYINNLFVTPEIHNLFVKRVRFSLIRVHKTQVTHTNNNHHDEKLMSALKWPIEYMFIGLKPTWNISDQNPHQHRDWHKFGHVVNAIMQPTHHAEISFQDRDTALPDACSSISDISPVTYPITLPIIKNISVTAHGINLIDKFPSKFCSSYIPFHYGGNAIKTPDDPGAMMITFALKPREEYQPSGHINVSRAREFYISWDTDYVGSITTADLVVSASAINFLLLQNGSAVLRYST

SEQ ID NO: 341 - protein, 125 aa, African swine fever virus
MAVYAKDLDNNKELNQKLINDQLKIIDTLLLAEKKNFLVYELPAPFDFSSGDPLASQRDIYYAIIKSLEERGFTVKICMKGDRALLFITWKKIQSIEINKKEEYLRMHFIQDEEKAFYCKFLESR

SEQ ID NO: 342 - protein, 115 aa, African swine fever virus
MGYTIQLDKDGDYCWDEDPTHHDPYMQANATSHVATSYATTSHAATPHAAAHHTFHEPFIKLNLTDKNIFNGLGFILIVIFIYLLLITLQQMLTRHIYNTVQHCVKAHLDSKNLQ

SEQ ID NO: 343 - protein, 412 aa, African swine fever virus
MEDTTFLEGANLAGITTLMNNLHINEQANLEELEKQVMGKQQSFPTDHFDEELNGLAKSLGINFNDPEFSLDSPHSIISKKPSGRGGDKVHGGIRRDSVCTDSICSDSVCSGSIRSGSIRSGSIRNGSIRSGSVRDGSIRNGSVRSGKTRRGLACNSSSRNDRGYSLSTHRKKYAESEASQKTAISKRDRKNHYAESEYSEKSIKPSTKQVDRLINHLRSNGDPNSFYKKDHDYERKTKLVKLEKINMLLTYLGNEQISTDDIKIPTIDSSMQEIDDVIEMLTLRNVGIRYSSIAEEILIGLARGLEIVFDGTREIPFLNYRPDYTGLHNTFMIKLFKMRYETSQVVGNLVQNMSPLSKICLELGPSLLLYPALIRTKHKASEDLYNLLQKGPEDPFTAYNEIHETLKKNNK

SEQ ID NO: 344 - protein, 175 aa, African swine fever virus
METNCPNILYLSGITIEECLQSKKTATDTLNTNDDEAEVEKKLPSVFTTVSKWVTHSSFKCWTCHLYFKTVPKFVPTYMRENERGEIEMGVLGNFCSFSCAASYVDVHYTEPKRWEARELLNMLYRFFTSQWISYIKPAPSYTMRKEYGGKLSEEAFISELHTLEESISSKHIFI

SEQ ID NO: 345 - protein, 263 aa, African swine fever virus
MEDETELCFRSNKVTRLEMFVCTYGGKITSLACSHMELIKMLQIAEPVKALNCNFGHQCLPGYESLIKTPKKTKNMLRRPRKTEGDGTCFNSAIEASILFKDKMYKLKCFPSTGEIQVPGVIFPDFEDGKNIIQQWVDFLQHQPIEKKIQIIEFKTIMINFKFQINPVSPRVIIHLKKFAALLEHIPTPYPIREIKPPLEDSKVSAKFMVSPGKKVRINVFLKGKINILGCNTKESAETIYTFLKDLISVHWQEILCVLPVPD

SEQ ID NO: 346 - protein, 66 aa, African swine fever virus
MDIKRALILFLLFLVVLSNAFVDYIISNFNHAVTCRKPTYFGIVLQGIFLVILFSIVDYLINENIL

SEQ ID NO: 347 - protein, 1340 aa, African swine fever virus
MDFQNDFLTNPLRVTLYNPVENEYTKTFIFLGSVPANVLQACRKDLQRTPKDKEILQNFYGEDWEKKLSQYVVGGDSDDLDEFEKLFVEDRGEETNVMMPEIETMYSEYSIFPEDTFKDIREKIYVATGIPPYRQHIFFFQNNALQVTYRLLLSGSGVALDIRDYKKEFQQVGGVNIDASMESQKDELYVEALDSFQLIKNIHHIFVADLNTLVAPMRRQISIAIEDNYQFDLLYYGLIMKYWPLLSPDAFKLLVQSPLQMEKQYPALSPSLTSLKKRLLLEQKLINFTYARAQQVIAKYEGNRLTRGTLAVTSAMIKISPLVNIQINVRNVFDLFPATPDIPQLVVFFYSKTGPTVVSKHHITSTEPEKFSNKTFRVPTIILIRFINKKAFILTIQNNGHYFIESNWSENERHDFNSVVSTLNNFINPIIHTINDMGPAAFPRGGSLPLPSNEDIQISISSMSVSTFWPYTLSSKGFTELKSRWREYEQAGIISVRGLQQTGVYNFLFKKGIYSYDPHEIERMIIISSGPGRKMDINVALLQNTYAYLFDTNVAARWETIYGGRNIRIYHRVTDIKIEMFNITQEEFNYLWVYLFVFLDNLITGPDKILVNKLSQLHDKQQGKGASQLRALQEQDPDLYDLRKYDTQATVYSVLCQHPRPPVIYSEAEVKSMPPAKRKELVKYWNFTEGVPAYYSCPHPDYPHLSLLEGRHPLNYCLPCCQKTKALLGTKRFYINNTCLTKHTFVEQDLEDLNTQTSRHTLSYGKKIPVNRIAFLPHQIADELFLNTIKEPDIFCIVGVEQTMLGISNAGLFYSLARILDLAPKALAIEIAKAANTPQYYILGNGAGNMFSSGAELANLILQTFVEQKNQLLQWDTTWQDIFLDLVAICYDLHCVFFKDKQGDIGFEVSPSTIQKILSPSKKIAIIFDTDEGIYPMAITQQKRFLKNSEAQYIFTEDDPVMEVIQSMSEFMCKDNWWDIHDVKNIPGYTVGKKLINRHNFCYALLIDSDTDRPIYFPIRLSSYIHDDIPIDFDLRPTQIASFEETWKFITLFNKQYKQYEIVPSAVLQNIKKEFVGFLSEGKTGLYFYYAPTQTLPATLEKLPIATLTIDPRDIDQAILYPLEEPYPQQNKANKAFYINHLYKFLLIEFFDVLYGLQSNSTRKHIENLFQKTDFQKITSVTEFYTKLSDFVDLNDIHTIKHILETTDAEHALKVLQKNIFNFDYTLLSPLQSYTYDELCQHLKKLLTPRIEFYEDIETIDRGLINIYTSCQYSTLNQPQCKKKRLRIPVNHFENYIHILAADILNPLKHSTLLLTGLGVIDDLQFILRPQEIISVKNKF

SEQ ID NO: 348 - protein, 1206 aa, African swine fever virus
MISIMDRSEIVARENPVITQRVTNLLQTNAPLLFMPIDIHEVRYGAYTLFMYGSLENGYKAEVRIENIPVFFDVQIEFNDTNQLFLKSLLTAENIVYERLETLTQRPVMGYREKEKEFAPYIRIFFKSLYERRKAITYLNNMGYNTAADDTTCYYRMVSRELKLPLTSWIQLQHYSYEPRGLVHRFSVTPEDLVSYQNDGPTDHSIVMAYDIETYSPVKGTVPDPNQANDVVFMICMRIFWIHSTEPLASTCITMAPCKKSSEWTTILCSSEKNLLLSFAEQFSRWAPDICTGFNDSRYDWPFIVEKSMQHGILEEIFNKMSLFWHQKLDTILKCYYVKEKRVKISAEKSIISSFLHTPGCLPIDVRNMCMQLYPKAEKTSLKAFLENCGLDSKVDLPYHLMWKYYETRDSEKIADVAYYCIIDAQRCQDLLVRHNVIPDRREVGILSYTSLYDCIYYAGGHKVCNMLIAYAIHDEYGRIACSTIARGKREHGKYPGAFVIDPVKGLEQDKPTTGLDFASLYPSLIMAYNFSPEKFVASRDEANSLMAKGESLHYVSFHFNNRLVEGWFVRHNNVPDKMGLYPKVLIDLLNKRTALKQELKKLGEKKECIHESHPGFKELQFRHAMVDAKQKALKIFMNTFYGEAGNNLSPFFLLPLAGGVTSSGQYNLKLVYNFVINKGYGIKYGDTDSLYITCPDSLYTEVTDAYLNSQKTIKHYEQLCHEKVLLSMKAMSTLCAEVNEYLRQDNGTSYLRMAYEEVLFPVCFTGKKKYYGIAHVNTPNFNTKELFIRGIDIIKQGQTKLTKTIGTRIMEESMKLRRPEDHRPPLIEIVKTVLKDAVVNMKQWNFEDFIQTDAWRPDKDNKAVQIFMSRMHARREQLKKHGAAASQFAEPEPGERFSYVIVEKQVQFDIQGHRTDSSRKGDKMEYVSEAKAKNLPIDILFYINNYVLGLCARFINENEEFQPPDNVSNKDEYAQRRAKSYLQKFVQSIHPKDKSVIKQGNVHRQCYKYIHQEIKKKIGIFADLYKEFFNNTTNPIESFIQSTQFMIQYFDGEQKVNHSMKKMVEQHATASNRAGKPAGNPAGNALMRAIFTQLITEEKKIVQALYNKGDAIHDLLTYIINNINYKIATFQTKQMLTFEFSSTHVELLLKLNKTWLILAGIHVAKKHLQAFLDSYNNESPSRTFIQQAIEEECGSIKPSCYDFIS

SEQ ID NO: 349 - protein, 122 aa, African swine fever virus
MPSTGTLVIIFAIVLILCIMLLFFYKTVEAGKSGVLPPPIPPPTPPPKKKYDHNEYMEKTDLEPEVKKNHRKWANEAEHLISSSVKGLENLDETAFLANHKGHGFRTFDHAKSLFKEFLKKY

SEQ ID NO: 350 - protein, 2476 aa, African swine fever virus
MGNRGSSTSSRPLPSSEANIYAKLQDHIQRQTRPFSGGGYFNGGGDKNPVQHIKDYHIDSVSSKAKLRIIEGIIRAIAKIGFKVDTKQPIEDILKDIKKQLPDPRAGSTFVKNAEKQETVCKMIADAINQEFIDLGQDKLIDTTEGAASICRQIVLYINSLTHGLRAEYLDVHGSIENTLENIKLLNDAIKQLHERMVTEVTKAAPNEEVINAVTMIEAVYRRLLNEQNLQINILTNFIDNILTPTQKELDKLQTDEVDIIKLLNDTNSVLGTKNFGKVLSYTLCNLGIAASVANKINKALQKVGLKVEQYLQSKNWAEFDKELDLKRFSGLVSAENIAEFEKAVNLLRQTFNERHKILENSCAKKGGDEEKTPLDRRIEAQRLDRKHILMEFLNKSTQAYNDFLENVKKIGIKLVKEIALTPNITRLRDALSRINDMGTIALDLSLIGFYTNAAAREERETFLTQLTLVKNVLEEISKTDPNFKNLYDSCSRLLQIIDFYTDIVQKKYGGEEDCECTRVGGAALTVEELGLSKAARSQVDLNQAINTFMYYYYVAQIYSNLTHNKQEFQSYEENYATILGDAIAGRLMQLDTEKNARINSPAVDLARGHVGPNPGGAQEVDWKATVSAIELEYDVKRRFYRALEGLDLYLKNITKTFVNNIDSIQTVQQMLDGVRIIGRWFTETTGDTLAQVFESFPTSTGNDSNVFTDNAPAGHYYEKVAAEIQQGRSVGTLRPVRASQAKNIRDLIGRSLSNFQALKNIINAFARIGDMLGGEELRQMVPMSPLQIYKTLLEYLQHSALSVGLKNLNQSEIGGQRMALAQTAEEAAQRVYLSTVRVNDALSTRWETEDVFFTFMLKSMAAKIFIVLGIYDMFERPEPVYKLIPTRMILGGADELEPEVIPEAAELYFRLPRLAEFYQKLFSFRDENVQISMLPELEGIFSGLIRIIFMRPIELINIGDYSETEIRQLIKEINVIYQHFNLEYGEQEATKKALIHFVNEINRRFGVITRTEWEKFQRIVQEARTMNDFGMMNQTNYSILPDEDGYTQSSQLLPSDRFISPSTQPTPKWRPALYNIDSVDVQTGMLQPNSQWDLVQKFRKQLSEMFEDPSLQQELGKISYQELIRQAINELKKEHTDKIQIVSKLIQGSESLADTDVNKIFLFHETVITGLNLLSAIYVLLNNFRNNIKGLDLDTIQKSIIEWLRETQAANVNRANLIDWLGRKHGAISEIRNPGLVIKEINMRLSMVYPDPTTEAAAAAQDRNLTTETLFAWIVPYVGIPAGGGVRPEQELAARYLVDNQRIMQLLLTNIFEMTSSFNKMVQVRFPETSTAQVHLDFTGLISLIDSLMADTKYFLDLLRPHIDKNIIQYYENRSNPGSFYWLEEHLIDKLIKPPTDAGGRPLPGGELGLEGVNQIINKTYTLLTKPYNVLQLRGGAQRRDAANIQINNNPQSSERFEQYGRVFSRLVFYDALENNSGLRVEQVALGDFRLSNLIRTNNAQEENTLSYWDNIALRTYANVNDAANNLRRYRLYGSDYGIQNNRSMMMVFNQLIASYITRFYDAPSGKIYLNLINAFANGNFSQAVMEMGYAHPDLARNNNVFGHRGDPTEQSVLLLSLGLILQRLIKDTNRQGLSQHLISTLTEIPIYLKENYRANLPLFNKMFNILISQGELLKQFIQYTNVQLARPNLTALLGANNDSVIYYNNNNVPATGLSVGQAALRGIGGVFRPNVTLMPLGDAQNNTSDVVRKRLVAVIDGIIRGSHTLADSAMEVLHELTDHPIYLETEEHFIQNYMSRYNKEPLMPFSLSLYYLHDLRIENNEVYDPLLYPNLESGSPEFKLLYGTRKLLGNDPVQLSDMPGVQLIMKNYNETVVAREQITPTRFEHFYTHAIQALRFIINIRSFKTVMMYNENTFGGVNLISENRDDKPIITAGIGMNAVYSLRKTLQDVISFVESSYQEEQINHIHKIVSPKGQTRTLGSNRERERIFNLFDMNIIPINVNALMRSIPLANIYNYDYSFEEIACLMYGISAEKVRSLDTTAPQPDVAEVLNIPNRPPINTREFMLKLLINPYVSVSITQYGNELLSKGNAGYMSRIFRGDNALNMGRPKFLSDQIFNKVLFGSLYPTQFDYDEAGPSLAAGIQRGRERWGHPMSIYINQALHEIVRTIRLAETVRGLRNVIDRNQIIGELNAFRTQLEDTRREVNNLIQTPEIQNNPTPEIIAAIQNWVQQYRGQITNLIDLIGNAGQANSMINLIQNITPQTAGAQLTALFNIRGLPAPPPRQALQNDIEAMQWFMTMVINHPPVLIAPFMLLVNNLKEFLNTLERYVYKTPRWLGPGTARIAQPPVGMAPGINMRHHTSYTENSVLTYITEQNREEGPWSIVKQVGVGIQKPTLVQIGKDRFDTRLIRNLIFITNIQRLLRLRLNLELSQFRNVLVSPDHIINPSITEYGFSITGPSETFSDKQYDSDIRIL

SEQ ID NO: 351 - protein, 201 aa, African swine fever virus
MDFILNISMKMEVIFKTDLRSSSQVVFHAGSLYNWFSVEIINSGRIVTTAIKTLLSTVKYDIVKSARIYAGQGYTEHQAQEEWNMILHVLFEEETESSASSENIHEKNDNETNECTSSFETLFEQEPSSEVPKDSKLYMLAQKTVQHIEQYGKAPDFNKVIRAHNFIQTIYGTPLKEEEKEVVRLMVIKLLKKISFYLTYI

SEQ ID NO: 352 - protein, 530 aa, African swine fever virus
MPSNMKQFCKISVWLQQHDPDLLEIINNLCMLGNLSAAKYKHGVTFIYPKQAKIRDEIKKHAYSNDPSQAIKTLESLILPFYIPTPAEFTGEIGSYTGVKLEVEKTEANKVILKNGEAVLVPAADFKPFPDRRLAVWIMESGSMPLEGPPYKRKKEGGGNDPPVPKHISPYTPRTRIAIEVEKAFDDCMRQNWCSVNNPYLAKSVSLLSFLSLNHPTEFIKVLPLIDFDPLVTFYLLLEPYKTHGDDFLIPETILFGPTGWNGTDLYQSAMLEFKKFFTQITRQTFMDIADSATKEVDVPICYSDPETVHSYANHVRTEILHHNAVNKVTTPNLVVQAYNELEQTNTIRHYGPIFPESTINALRFWKKLWQDEQRFVIHGLHRTLMDQPTYETSEFAEIVRNLRFSRPGNNYINELNITSPAMYGDKHTTGDIAPNDRFAMLVAFINSTDFLYTAIPEEKVGGNETQTSSLTDLVPTRLHSFLNHNLSKLKILNRAQQTVRNILSNDCLNQLKHYVKHTGKNEILKLLQE

SEQ ID NO: 353 - protein, 80 aa, African swine fever virus
MLIPVVCFTCGFPIGTYAAIFDKARTEYIKTKMGGTLPQNIPLDASLQIELKDLITALGIPMRVCCRTHLITTLDYRKYY

SEQ ID NO: 354 - protein, 307 aa, African swine fever virus
MTTHIFHADDLLQALQQAKAEKNFSSVFSLDWDKLRTAKRNTTVKYVTVNVIVKGKKAPLMFNFQNEKHVGTIPPSTDEEVIRMNAENPKFLVKKRDRDPCLQFNKYKISPPLEDDGLTVKKNEQGEEIYPGDEEKSKLFQIIELLEEAFEDAVQKGPEAMKTKHVIKLIQRKISNSAVKNADKPLPNPIARIRIKINPATSILTPILLDKNKPITLQNGKTSFEELKDEDGVKANPDNIHKLIESHSIHDGIINARSICISNMGISFPLCLEMGVVKVFEKNNGIDVNSIYGSDDISTLVNQIAIA

SEQ ID NO: 355 - protein, 174 aa, African swine fever virus
MLTLIQGKKIVNDLRSRLAFEYNGQLIKILSKNIVAVGSLRREEKMLNDVDLLIIVPEKKLLKHVLPNIRIKDLSFSVKVCGERKCVLFIEWKKNTYQLDLFTALAEEKPYAVLHFTGPVSYLIRIRAALKKKNYKLNQYGLFKNQTLVPLKITTEKELIKELGFTYRIPKKRL

SEQ ID NO: 356 - protein, 61 aa, African swine fever virus
MALDGSSGGGSNVETLLIVAIIVVIMAIMLYYFWWMPRQQKKCSKAEECTCNNGSCSLKTS

SEQ ID NO: 357 - protein, 1460 aa, African swine fever virus
MKFYYVFSKNMEAGYAEIAAVQFNIAGDNDHKRQGVMEVTISNLFEGTLPAEGGIYDARMGTTDHHYKCITCSHQRKQCMGHPGILQMHAPVLQPLFIAEIRRWLRVICLNCGAPIVDLKRYEHLIRPKRLIEAASSQTEGKQCYVCKAVHPKIVKDSEDYFTFWADQQGKIDKLYPQIIREIFSRVTYDTVVKLGRSKNSHPEKLVLKAIQIPPISIRPGIRLGIGSGPQSFHDINNVIQYLVRKNLLIPKDLQIVRGQKIPLNIDRNLQTIQQLYYNFLLDSVSTTATQGGTGKRGIVMGARPAPSIMRRLPRKEGRIRKSLLGSQVWSISRSTICGNSDLHLDEVGYPISFARTLQVAETVQHYNINRLMPYFLNGKRQYPGCSRVYKQITQSVHDIEGLKQDFRLEVGDILYRDVVTGDVAFFNRQPSLERSSIGVHRIVVLENPKISTFQMNVSACAWYNADFDGDQMNLWVPWSVMSRVEAELLCSVRNWFISTKSSGPVNGQVQDSTVGSFLLTRTNTPMGKNVMNKLHAMGLFQTTQTDPPCFANYSPTDLLDGKSVVSMLLRQTPINYQRAPTWYSEVYAPYMHYNKQDISTQIRNGELIEGVLDKKAVGAGSSGGIYHLISRRYGPQQALKMIFATQQLALNYVRNAGFTVSTADMLLTPEAHQEVQEIINELLLESEEINNRLLHGDIMPPIGLTTHDFYEKLQLNALKFPDRILKPIMNSINPETNGLFQMVATGAKGSNPNMIHIMAGIGQIEINTQRIQPQFSFGRTLVYYPRFALEAQAYGFICNSYIAGLTSPEFIFGEMNGRFDLINKALSTSSTGYANRKAIFGLQSCIVDYYRRVSIDTRLVQQLYGEDGLDARQLETVRFETIMLSDQELEDKFKYTGIQSPLFEEEFSRLKKDRDKYRQIFLNVENFNFSQLLTDVRQVPVNVASIVKNILLSSTSGVLPFDEKSILQKYAMVKTFCKNLPYVFINNIQERLQTPIPVYLKRAASLMRMLIRIELATVKTLNITCEQMSAILDLIRLQYTQSLINYGEAVGILAAQSVSEPLTQYMLDSHHRSVAGGTNKSGIVRPQEIFSAKPVEAEQSSEMLLRLKNPEVETNKTYAQEIANSIELITFERLILQWHLLYETYSSTKKNVMYPDFASDVEWMTDFLENHPLLQPPEDIANWCIRLELNKTTMILKSISLESIINSLRAKHPNTYIMHSVENTASGIPIIIRIYLRESAFRRSTNTRMATDEKIAVNVVDKLLNSTIRGIPGIKNANVVKLMRHRVDAQGKLVRLDNIYAIKTNGTNIFGAMLDDNIDPYTIVSSSIGDTMELYGIEAARQKIISEIRTVMGDKGPNHRHLLMYADLMTRTGQVTSLEKAGLNAREPSNVLLRMALSSPVQVLTDAAVDSAVNPIYGIAAPTLMGSVPRIGTMYSDIIMDEKYITENYKSVDSLIDML

SEQ ID NO: 358 - protein, 419 aa, African swine fever virus
MLNQFPGQYSNNIFCFPPIESETKSGKKASWIICVQVVQHNTIIPITDEMFSTDVKDAVAEIFTKFFVEEGAVRISKMTRVTEGKNLGKKNATTVVHQAFKDALSKYNRHARQKRGAHTNRGIIPPMLVKYFNIIPKTFFEEETDPIVQRKRNGVRAVACQQGDGSILLYSRTKKEFLGLDNIKKELKQLYLFIDVRVYLDGELYLHRKPLQWIAGQANAKTDSSELHFYVFDCFWSDQLQMPSNKRQQLLTNIFKQKEDLTFIHQVENFSVKNVDEALRLKAQFIKEGYEGAIVRNANGPYEPGYNNYHSAHLAKLKPLLDAEFILVDYTQGKKGKDLGAILWVCELPNKKRFVVTPKHLTYADRYALFQKLTPALFKKHLYGKELTVEYAELSPKTGIPLQARAVGFREPINVLEII

SEQ ID NO: 359 - protein, 868 aa, African swine fever virus
MASLDNLVARYQRCFNDQSLKNSTIELEIRFQQINFLLFKTVYEALVAQEIPSTISHSIRCIKKVHHENHCREKILPSENLYFKKQPLMFFKFSEPASLGCKVSLAIEQPIRKFILDSSILVRLKNRTTFRVSELWKIELTIVKQLMGSEVSAKLAAFKTLLFDTPEQQTTKNMMTLINPDDEYLYEIEIEYTGKPESLTAADVIKIKNTVLTLISPNHLMLTAYHQAIEFIASHILSSEILLARIKSGKWGLKRLLPQVKSMTKADYMKFYPPVGYYVTDKADGIRGIAVIQDTQIYVVADQLYSLGTTGIEPLKPTILDGEFMPEKKEFYGFDVIMYEGNLLTQQGFETRIESLSKGIKVLQAFNIKAEMKPFISLTSADPNVLLKNFESIFKKKTRPYSIDGIILVEPGNSYLNTNTFKWKPTWDNTLDFLVRKCPESLNVPEYAPKKGFSLHLLFVGISGELFKKLALNWCPGYTKLFPVTQRNQNYFPVQFQPSDFPLAFLYYHPDTSSFSNIDGKVLEMRCLKREINHVSWEIVKIREDRQQDLKTGGYFGNDFKTAELTWLNYMDPFSFEELAKGPSGMYFAGAKTGIYRAQTALISFIKQEIIQKISHQSWVIDLGIGKGQDLGRYLDAGIRHLVGIDKDQTALAELVYRKFSHATTRQHKHATNIYVLHQDLAEPAKEISEKVHQIYGFPKEGASSIVSNLFIHYLMKNTQQVENLAVLCHKLLQPGGMVWFTTMLGEQVLELLHENRIELNEVWEARENEVVKFAIKRLFKEDILQETGQEIGVLLPFSNGDFYNEYLVNTAFLIKIFKHHGFSLVQKQSFKDWIPEFQNFSKSLYKILTEADKTWTSLFGFICLRKN

SEQ ID NO: 360 - protein, 250 aa, African swine fever virus
MDTAMQLKTSIGLITCRMNTQNNQIETILVQKRYSLAFSEFIHCHYSINANQGHLIKMFNNMTINERLLVKTLDFDRMWYHIWIETPVYELYHKKYQKFRKNWLLPDNGKKLISLINQAKGSGTLLWEIPKGKPKEDESDLTCAIREFEEETGITREYYQILPEFKKSMSYFDGKTEYKHIYFLAMLCKSLEEPNMNLSLQYENRIAEISKISWQNMEAVRFISKRQSLNLEPIIGPAFNFIKNYLRYKH

SEQ ID NO: 361 - protein, 129 aa, African swine fever virus
MDINPLLYLQAFNNDATTFNTQGHILEQQSDSAYFDTFANAMQAYLDTKQGGNDEEGTIILMDDEDFNDSESLEDFLQMLSEEELNDGFSSDDEPEEHVILTEDNQGEPSETPQATFDITEFIKTDDED

SEQ ID NO: 362 - protein, 79 aa, African swine fever virus
MNKTIEYQKEFLKENNQLLSIPVKKNILKEILQNDEQDTIITNCITKEVSINLDLIKNPKVLYSIYIMVVEYLKSINIA

SEQ ID NO: 363 - protein, 339 aa, African swine fever virus
MIDQKIFETTLNIDDPTNFCTNVEAHLLKELENIYVGKCFKNSFILNITGVIQRSPCFIMRTNNSGRGYMHVRFSAVVSYLNAFDLIAAVKIIKNDSNIILGESLLTEPVTIVIPSSESQNNVAEVGQIVPVQLANSSVYYIPGRQQASATGSIFIPKHTFSVYHVQEELTQEQALNLTKLVNIIEMLLESRSKKDFKQICFFEKLYYTYSISSDEILDLKIWKGPKGKEMSRLKPCNVLSFLYDALKNKNSSLGFWARPPNLLKSSPLAYQQDQNSFNATELPIICSAEVMFVTLLKEIINYLQFINDLCDTFNNEQLIKRHENIWMLIEQRKIGHDF

SEQ ID NO: 364 - protein, 1133 aa, African swine fever virus
MAYPELDAADFLQQLARRKEFKSLISPPVDQKELIRDLRAHFVQIGGPGCEKGGRAFFPCDPYASPFPSIKGLQLHNAQLFVQNFQNPNTPYSRLLLNWQTGTGKSIAAIAIARQFMNHYMNFIENAPWIFVVGFTRAIIQTEMLRRPELGFVSYKEVAELHRLLHIAKQSGSTTSVESRHLNGFVSTLKRRLTDRNRGGFFQFYGYKEFASKLFNITSKGEEKNFDVLSLFHRSDEAEDTLNENDISQFVQKISEAETNGLIRVNQKIMEQLRGGLLIADEIHNVYNIQERNNYGIALQYVLDAFPPHQAPRAVFMSATPVTGSVMEYVDLLNLLVPRHELPNGQPLQRQQLFDSSGHSVKWKKDALALVERLSTGRVSFLLDTNTNFYPERIFAGKMLSYKDETLPYLHFIECPMSEYQLETLKQLGPDPKISSNAYSIYDMVFPNPKFSKQTEPKAYGLFNSTETPTALSMASTDWLLENGVQIIEPSRRAPFNVSGSFLSLQPPTHISGLAFYSGKYTQMMKDILSIIRQGRGKILIYHNRVRMSGVLILQEILQSNGILNEVSSPVGTTRCSICAAIRDEHTHSDHQFIPVRFTILHSEIEPAVRERSLALFNASSNLEGHQLRILIGSKVIVEGLNFQAVRYEMIMSLPLDIPRLIQVFGRVVRKNSHMELPPSERNVTIYLYVSTTPDGGPELAKYAQKLKEYILIQEGDKALRKHAIDGFTNQIKIDKPMLESLPLSPSITPANVGATVLNTFEAYGYGEQEVKTISNIIISLFMARPVWTYSELWKAVSTPKLIQGITIDNKLFSEDNFALALISLCYSKNQCKELWIQNRLCTIMHVPAKPEHLYVAAVLNHKKEPVLDIETYIRDFQPPAMHSIRITKYLEHSQTKEPFQVLYEKFQKDFQDEPMEQVLIHYPASFHYTMLEALIIDNLAGMGALVEVYKKFFIAFSKKDIQPFPDIFKIISHVPGDDNTLVGYATEDSVRLITSREDKTWHEIPLYMLNINVKRKENDIVIGYMESKGKALKFKIRPPIQVLKKNEITDIRMLNRGAVCETRGREEQQKIADQLGISLNLTKISAIKLCLLIRNNLLQKEMEARNQPNGMQDGIRWFYLFNDKMPSLVHTS

SEQ ID NO: 365 - protein, 117 aa, African swine fever virus
MDTETSPLLSHNLSTREGIKQSTQGLLAHTIAKYPGTTAILLGILILLIIILIIVAIVYYNRTIDCKSSIPKPPPSYYVQQPEPHHHFPVFFRKRKNSTSLQSHIPSDEQLAELAHS

SEQ ID NO: 366 - protein, 205 aa, African swine fever virus
MAMQKLFTYIYEFIEYRKMVLLEEKVPYDKFVQMVLNTGFFRINAETLNHGIVSVFIFGANGKYVHHGGDMRTLLTNTLNEKKHYEELILIVDKPVLSKKNILDIIVEQRAANPTIVINIYPYHLFCINIPKVSAIPKHKLITQEEAQEFLGREYLQPQDLMQISASDPPVVWLGGRPGDFVQIERPSETAMHAVVIRFITKSKI

SEQ ID NO: 367 - protein, 345 aa, African swine fever virus
METFVRLFKDSPQQRSDAWHAIRRTQVGGSDLASVLGLNPYKSYYITLAEKANLFKKNLNRAACSWGTLFERVSKDLLELFCQTTVIGDNIHIDGTYLGYPGHSNSPDGFCHLTLGYTQQSWEIKTIFNNVRYEATKRIPVLVEIKSPFNRKIKNSVPSYYMPQIQSGLALSPPISMGIYVEAMFRVCGIHQLGSNNETNTDIHPPESMLPLAWGIITICSTQEHTEAPQDFGTLDAETFRQLLETLYQKDQYTIHYSMPYETACPEMPNVVGYFGWKVFIFQIIPVMKHPQFLKDKYPIIQQFLRDLHTIKASPSPMEMYEKICCSEESALSTEDIDNFTDMLT

SEQ ID NO: 368 - protein, 183 aa, African swine fever virus
MSVVVGGVEYSLNNWARYEIKRRAAELESVNYYPHCEYIMPEDIVVSILGSKPNCPFLEALKRFHDFLKKRRIIFKGEYLVIPWMGAQDVADMIHHVENRINLDHLEDLAHMLKLITYHRSFDTCINQAFEHLYAFKFPDANIETHELKHIRQLEKKMYGYILRLEKLQTVLTFYIEFLLKQV

SEQ ID NO: 369 - protein, 273 aa, African swine fever virus
MSILEKITSSPSECAEHLTNKDSCLSKKIQKELTSFLEKKETLGCDSESCVITHPAVKAYAQQKGLDLSKELETRFKAPGPRNNTGLLTNFNIDETLQRWAIKYTKFFNCPFSMMDFERVHYKFNQVDMVKVYKGEELQYVEGKVVKRPCNTFGCVLNTDFSTGTGKHWVAIFVDMRGDCWSIEYFNSTGNSPPGPVIRWMERVKQQLLKIHHTVKTLAVTNIRHQRSQTECGPYSLFYIRARLDNVSYAHFISARITDEDMYKFRTHLFRIA

SEQ ID NO: 370 - protein, 1192 aa, African swine fever virus
MEAFEISDFKEHAKKKSMWAGALNKVTISGLMGVFTEDEDLMALPIHRDHCPALLKIFDEIIVNATDHERACHNKTKKVTYIKISFDKGVFSCENDGPGIPIAKHEQASLIAKRDVYVPEVASCHFLAGTNINKAKDCIKGGTNGVGLKLAMVHSQWAILTTADGAQKYVQHINQRLDIIEPPTITPSREMFTRIELMPVYQELGYAEPLSETEQADLSAWIYLRACQCAAYVGKGTTIYYNDKPCRTGSVMALAKMYTLLSAPNSTIHTATIKADAKPYSLHPLQVAAVVSPKFKKFEHVSVINGVNCVKGEHVTFLKKTINEMVVKKFQQTIKDKNRKTTLRDSCSNIFIVIVGSIPGIEWTGQRKDELSIAENVFKTHYSIPSSFLTSMTKSIVDILLQSISKKDNHKQVDVDKYTRARNAGGKRAQDCMLLAAEGDSALSLLRTGLTLGKSNPSGPSFDFCGMISLGGVIMNACKKVTNITTDSGETIMVRNEQLTNNKVLQGIVQVLGLDFNCHYKTQEERAKLRYGCIVACVDQDLDGCGKILGLLLAYFHLFWPQLIIHGFVKRLLTPLIRVYEKGKTMPVEFYYEQEFDAWAKKQTSLANHTVKYYKGLAAHDTHEVKSMFKHFDNMVYTFTLDDSAKELFHIYFGGESELRKRELCTGVVPLTETQTQSIHSVRRIPCSLHLQVDTKAYKLDAIERQIPNFLDGMTRARRKILAGGVKCFASNNRERKVFQFGGYVADHMFYHHGDMSLNTSIIKAAQYYPGSSHLYPVFIGIGSFGSRHLGGKDAGSPRYISVQLASEFIKTMFPAEDSWLLPYVFEDGQRAEPEYYVPVLPLAIMEYGANPSEGWKYTTWARQLEDILALVRAYVDKDNPKHELLHYAIKHKITILPLRPSNYNFKGHLKRFGQYYYSYGTYVISEQRNIITITELPLRVPTVAYIESIKKSSNRMTFIEEIIDYSSSETIEILVKLKPNSLNRIVEEFKETEEQDSIENFLRLRNCLHSHLNFVKPKGGIIEFNTYYEILYAWLPYRRELYQKRLMREHAVLKLRIIMETAIVRYINESAELNLSHYEDEKEASRILSEHGFPPLNHTLIISPEFASIEELNQKALQGCYTYILSLQARELLIAAKTRRVEKIKKMQARLDKVEQLLQESPFPGASVWLEEIDAVEKAIIKGRNTQWKFH

SEQ ID NO: 371 - protein, 359 aa, African swine fever virus
MEKIFQNVEIKPFLIDFSNLFIKNAAKKLFQLEEQLPLVPVNVVMDFKGISRAAVHGLSRVLQDEIPNYMLDIKPGGYKIEDSTDLFMTEQFIRNRINFIPIYAKNETLVFALRSLNNSCEVKTIYSRDLIQVAGPKLKYPIFNPTFEIGFLQPGKSLIIEDIYIKKGIGRKHAAFNLAVKTHFSHLDIEQYPTDKKEYMALSGYKQSSMTSDPRHHRLGLCFPAVPLPHINQAVRTYLKNACRIIIGRIQSIQKIYENFEEPQPELVLFSMDEEKTKAIITIKDETHTIGNLLKTYIYEMIPDISFVGYQCVPHKQEMVLTIIHKASQEDLITLLEKSIQNIIQTFQILEKNVDELIA

SEQ ID NO: 372 - protein, 171 aa, African swine fever virus
MVVYDLLVSLSKESIDVLRFVEANLAAFNQQYIFFNIQRKNSITTPLLITPQQEKISQIVEFLMDEYNKNNRRPSGPPREQPMHPLLPYQQSSDEQPMMPYQQPPGNDDQPYEQIYHKKHASQQVNTELNDYYQHILALGDEDKGMDSMLKLPEKAKRDSDDEDDMFSIKN

SEQ ID NO: 373 - protein, 124 aa, African swine fever virus
MNLEYVQVVQKFNQVLLELTKKVCTVVGGSKPTYWYHHIRRVCSECPSMPMSMIGPYLNVYKAQILTRDKNFFMNFDPAHNEYTFIIQKLKEAARNMPEDELEQYWVKLLFLLKSYIKCKPFIN

SEQ ID NO: 374 - protein, 339 aa, African swine fever virus
MAGRVKIKQKELIDSTVKNKNVMNLFHEIIGSKGNINFSVVWPKFKKIKQSVYDYISTLSVLEKANVMQNFEADKKLLELFVQKLWAAYEGYFKYPEIEKYEVEGQVNFNLVPQCVLEKFSQLYRIRINSELVTLILNSCAFMSKYNDYILKKDPYILTITPGLCFSPIPNFEDLNFKHLYNSDKNSQHDKEFIMFILYKLYTAALGVYNAISIPDIDVEDLENIILSSVSQIKKQIPRCKDAFNKIESSVHLLRKNFNTYYSDYVGSGYNPTIIMEQYIKDISQDSKNISPRISYQFRTIIKYYRDMIATRHQTMDPQVLNLVKHVEKKLDMLDREKN

SEQ ID NO: 375 - protein, 108 aa, African swine fever virus
MVNLFPVFTLIVIITILITTRELSTTMLIVSLVTDYIIINTQYTEQQHENNTFFMPQKNSFNESYNKDKKSNIHIPYQWLAPELKEAESKYWWGNYDPHSEPVLAGAS

SEQ ID NO: 376 - protein, 233 aa, African swine fever virus
MILIASPFSLAHLEYLHTWHVTIKNIAQQHGLDIKVAIVVSTSHLNNFLPISGALNIECITFPSCGIKEIDLLWARIKLFQHYCAIGARLLWLVSADIRPPVSAWPAIADSLKKGADAVVIPYPSRWNNLIPTVIKEIVVHQKKCLVAVDARHLDTDTQIVGAGMGCIVLTLKALMVRLSIGKQPVKILWPDLHGTAEGIPLEGVEVGWFLNAYAHKLNIRCLGADHIAQHLT

SEQ ID NO: 377 - protein, 241 aa, African swine fever virus
MAANIIATRAVPKMASKKEHQYCLLDSQEKRHGHYPFSFELKPYGQTGANIIGVQGSLTHVIKMTVFPFMIPFPLQKTHIDDFIGGRIYLFFKELDMQAVSDVNGMQYHFEFKVVPVSPNQVELLPVNNKYKFTYAIPVVQYLTPIFYDLSGPLDFPLDTLSVHVDILSNHIQLPIQNHNLTTGDRVFISGYKHLQTIELCKNNKIFIKNIPPLSSEKIKLYILKNRIRIPLYFKSLKTSK

SEQ ID NO: 378 - protein, 298 aa, African swine fever virus
MSRPEQQLKKMLKNPQAQYAFYPTAKVERISTTQHMYFIATRPMFEGGRNNVFLGHQVGQPIIFKYVSKKEIPGNEVIVLKALQDTPGVIKLIEYTENAMYHILIIEYIPNSVDLLHYHYFKKLEETEAKKIIFQLILIIQNIYEKGFIHGDIKDENLIIDINQKIIKVIDFGSAVRLDETRPQYNMFGTWEYVCPEFYYYGYYYQLPLTVWTIGMVAVNLFRFRAENFYLNDILKRENYIPENISETGKQFITECLTINENKRLSFKSLVSHPWFKGLKKEIQPISELGVDYKNVIT

SEQ ID NO: 379 - protein, 706 aa, African swine fever virus
MSCVHNNTSFPVQIEAYLKEVYEKYKELQESKDTSLTARFARALKYYQFLIYTAFSDPKFGIGQGENTRGLLIYHQMGMGKTILSLSLAISLSHIYNPILIAPKSLHSNFQQSLLKLIKLLYPETTDHSKELQKISRRFRFVSLDAYNMGQQIIKAGGSLNGCLLIVDEAHNLFRGIINSANDKTNARQLYNNIMQAKNIRILFLTGTPCSKDPFEMVPCFNMLSGRILLPLHYERFYTAYVNKTTNSPLNADKLLNRLVGMISYAGNQNELNKLFPTELPLIIEKVEMSPEQYRQYLLARDVENAEKHASSGMYEKINAAALCLPGSEQESGSSYYVRSRMISIFASEMLTVKEDEKLSEAVQQLPKEAFTENSSPKIVRMLKNIKTSPGPVLIYSQFVELGLHVVARFLEIEGYQCLQPLKVLEEGHNTILLHKDGKDLMVKNFAEDGPTHTLVLSSKITRFTLITGKILSKERDMIQQLWNSPLNIHGEVIKILLVSKTGAEGLDLKYGRQVHILEPYWDKAREDQVKARIIRIGSHDALPPEEKTVQPFLYIAVANQKMFYSIPEGSQEQKTIDERFHERGLEKSHLNSAFRDLLKRAAIECAFNGESGCLMCQPTNALLFHENFERDLRLPNPCQPLVKAEVKAYSISYEGKQFFYQKNKDVGLGYTFYEYNPIIKAYIEIKPSNPLYIKLIKHVQAGTTA

SEQ ID NO: 380 - protein, 509 aa, African swine fever virus
MEAIISFAGIGINYKKLQSKLQHDFGRVLKALTVTARALPGQPKHIAIRQETAFTLQGEYIYFPILLQKQFEMFNMVYTTRPVSLRALPCVETEFPLFNYQQEMVDKIHKKLLSPYGRFYLHLNTGLGKTRIAISIIQKLLYPTLVIVPTKAIQIQWIDELTLLLPHLRVAAYNNAACKKKDMTSKEYDVIVGIINTLRKKPEQFFEPFGLVVLDEAHELHSPENYKIFWKIQLSRILGLSATPLDRPDGMDKIIIHHLGQPQRTVSPTTTFSGYVREIEYQGHPDFVSPVYINEKVSAIATIDKLLQDPSRIQLVVNEAKRLYSLHTAEPHKWGTDEPYGIIIFVEFRKLLEIFYQALSKEFKDVQIIVPEVALLCGGVSNTALSQAHSASIILLTYGYGRRGISFKHMTSIIMATPRRNNMEQILGRITRQGSDEKKVRIVVDIKDTLSPLSSQVYDRHRIYKKKGYPIFKCSASYQQPYSSNEVLIWDPYNESCLACTTTPPSPSK

SEQ ID NO: 381 - protein, 383 aa, African swine fever virus
MASILTLDGLYAEVPKFLPEALREGCAGKNPLSFYIQQILNLMGCDGNEYHVLFTSSSEEANTHMIMAAVRRHLLRTQQRPHVIIGAAEPPSVTECVKALAQEKRCVYTIIPLKNFEIDPVAVYDAIQSNTCLACISGTNAVVKTFNKLQDISNVLKGIPLHSEVSDLVYQGCIQQNPPADSFSINSLYGFLGVGVLGMKKKVMQGLGPLIFGGGLRGGSPNIPGIHAMYKTLTQQRPSMKKNKYNTYAVHENFKKHQHVYLPIGGVSAEDTSAENISTKDMPVEGPKGLPGYILFSVGRRAEELQKKIFTKFNIKVGRVVDLQEILFRIKIPQKYWETLLFIQLRDNLTKEDIKRVMVVLMHLDTITPRGSLPPPSHSSSFS

SEQ ID NO: 382 - protein, 184 aa, African swine fever virus
MKTFITCTSVKNYFRQHLKTNQRISSELISYVCTILNHICHQYLQNPQAQEEEWFALIKELPIIKDGLSKEERFFSSGVKHFLHEYKITPENQEKFQKMLNAITEQLMSRLCKVFSIMIQRQGFLKTQTLMYSHLFTILSILMVADNLYGEQDPTEFFSLIIEQTKTIKKKKKSGSEEEESHEE

SEQ ID NO: 383 - protein, 184 aa, African swine fever virus
MDSEFFQPVYPRHYGECLSPVTTPSFFSTHMYTILIAIVVLVIIIIVLIYLFSSRKKKAAAIEEEDIQFINPYQDQQWVEVTPQPGTSKPAGATTASVGKPVTGRPATNRPATNKPVTDNPVTDRLVMATGGPAAAPAAASAPAHPAEPYTTVTTQNTASQTMSAIENLRQRNTYTHKDLENSL

SEQ ID NO: 384 - protein, 423 aa, African swine fever virus
MLWRNEITEFMDQLSKYSQEILKTFKQLRPSEYKQYNEFLTQVTPLLQKTPEKIPELVDHIFNYLDNVEKICELLVNASSIIISSKIREQVKHGMSFSYKADLDSLADILSQKQYVLMHLSKNIAAEYFNTCLNQGKSKLDLKAASVFYSSRSRTASSAELYRKMLYAYGSPQEINYYTEKARNKTLDVEESDSMAIIERTARHNLSLMHPLEAMGLTFGATNTDADPEDLKDKTVINLTLPQATESITYHLKSLMQLKKVSTASGLNTNILKAFDNIISTPVKKNKMASKLAPGMDVVFTSDNGKTFFTKNILSKNMLAGPKERVFAYNNLISNLNNSCFIQNHNDFLRQQDSWPFYDAHNFTNKFLMQPIFSGQTRPRLQGAMEAAHVETHLTAFLQSIQPSRPQDPSVLASPKLSALILN

SEQ ID NO: 385 - protein, 301 aa, African swine fever virus
MSEDIRRGPGRPPKKRVVPNFERKGILEKPVRPQSRLEFSYDNPLIFKNLFIYFKNLKSKNILVRCTPTEITFFSRDQSQASFVIATIDGKNVNHYYASDVFWLGINRELVEKMFNSIDRSFLKITIVHRYDKPETLFFIFTDFDIDKECTYQITVSEPELDMDLIEMEKSISEERLKNYPLRWEFTSKQLKKTFSDLSNYTELVTIEKLGGDTPLHLYFQKFNSISYHEMYKSSNKINLTSTIPKSQVFQINVKIAHIKSLASAMVTDKIRILCEENGNLIFQSEMDALMLNTITLNTTI

SEQ ID NO: 386 - protein, 146 aa, African swine fever virus
MGGTTDFVLSITIVLVILIIIAFIWYNFTGWSPFKYSKGNTVTFKTPDESSIAYMRFRNCVFTFTDPKGSLHSIDVTEVLNNMAKGFRDAQNPPSSFTLGGHCQAPLNAFSFVLPGVNDRATVATADEAKKWENCDATLTGLQRII

SEQ ID NO: 387 - protein, 199 aa, African swine fever virus
MSCMPVSTKCNDIWVDFSCTGPSISELQKKEPKAWAAILRSHTNQQTAEDDNIIGSICDKQGLCSKDEYAYSQYCACVNSGTLWAECAFAPCNGNKNAYKTTEQRNILTNKQCPSGLTICQNIAEYGGSGNISDLYQNFNCNSVINTFLINVMNHPFLTLILIILILIIIYRLMSSSGGKHNDDKLPPPSLIFSNLNNF

SEQ ID NO: 388 - protein, 165 aa, African swine fever virus
MATNFFIQPITEEAEAYYPPSVITNKRKDLGVDVYCCSDLVLQPGLNIVRLHIKVACEHMGKKCGFKIMARSSMCTHERLLILANGIGLIDPGYVGELMLKIINLGDTPVQIWAKECLVQLVAQGDHVPDHINILKRNQIFPLFAPTPRGEGRFGSTGEAGIMRT

SEQ ID NO: 389 - protein, 248 aa, African swine fever virus
MGGSTSKNSFKNTTNIISNSIFNQMQSCISMLDGKNYIGVFGDGNILNHVFQDLNLSLNTSCVQKHVNEENFITNLSNQITQNLKDQEVALTQWMDAGTHDQKTDIEENIKVNLTTTLIQNCVSSLSGMNVLVVKGNGNIVENATQKQSQQIISNCLQGSKQAIDTTTGITNTVNQYSHYTSKNFFDFIADAISAVFKNIMVAAVVIVLIIVGFIAVFYFLHSRHRHEEEEEAEPLISNKVLKNAAVS

SEQ ID NO: 390 - protein, 122 aa, African swine fever virus
MADFNSPIQYLKEDSRDRTSIGSLEYDENADTMIPSFAAGLEEFEPIPDYDPTTSTSLYSQLTHNMEKIAEEEDSNFLHDTREFTSLVPDEADNKPEDDEESGAKPKKKKHLFPKLSSHKSK

SEQ ID NO: 391 - protein, 296 aa, African swine fever virus
MFGAFVSHRLWSDSGCTTTCITNSIANYVAFGEQIGFPFKSAQVFIAGPRKAVINIQEDDKVELLKMIVKHNLWVVAHGTYLDVPWSRKSAFVTHFIQQELLICKEVGIKGLVLHLGAVEPELIMEGLKKIKPVEGVVIYLETPHNKHHTYKYSTIEQIKELFLRIRNTRLKQIGLCIDTAHIWSSGVNISSYNDAGQWLRSLENIHSVIPPSHIMFHLNDAATECGSGIDRHASLFEGMIWKSYSHKIKQSGLYCFVEYVTRHQCPAILERNLGSSMQLQTALTAEFTTLKSLLK

SEQ ID NO: 392 - protein, 111 aa, African swine fever virus
MSFSECPLVISACKKFLQKRITIENEALINALITALAQTSTLNDLCLLPIQTYLLSYKNAFEWIHFVCIAITTILDNKYNWKDCTVDINYIFLHVTYIYNIKTKEYLDYCS

SEQ ID NO: 393 - protein, 50 aa, African swine fever virus
MHISIITRYTLKYIYMHLTHNHILFTYIMRIYLIKHNHMLFTTHVYTYIM

SEQ ID NO: 394 - protein, 279 aa, African swine fever virus
MLLVLIDVDGFMGQLYNENGTQTILIPREVVIFYWEKNTPSKILQLFFHGGIDPIFEKINQRSFSFQSRHIHHFTLDESPLPNSIALPTDTLQAFKAGKKMIFQHLVKITKDHEQILLLHKGGPEGEWIRSFNIPNATVQNLNDLCCPSVEKLVLKKRDYISSSIGCPKHIQGSNHCPVFECHVLFKWIQENTSIVQGVLERPSLPYEKADLFIEHRINMVDNHPFKKDSIKQNQKKRTGSQRNLSNMGYMLTMASLARFIINTASFNKCIYPLSQDIR

SEQ ID NO: 395 - protein, 226 aa, African swine fever virus
MKMETFLVCLFHNADGLHQQIQEILYLLRMHIYETNLYLKQELSRLIYPNRQLSFVLLMPLSLLRNWDDIEYLTDVVDDKQTLHYAANLLTNYVLHLSMFQKLTKPYFLLAVKRVSEKLNKKQRHSFYEVLVTSETLNNYENLSKNILNTLMFAVRYVFKPTPNYSEILAELEKKNKIHHIIFNMVITDFAQIREQQMDKHLCETNNELRQECKETIFDLKVVGNV

SEQ ID NO: 396 - protein, 243 aa, African swine fever virus
MKMHIARDSIVFLLNKYLQNTILTNKIEQECFLQADTPKKYLQYIKPFLINCMTKNITTDLVMKDSKRLEPYIILEMRDIIQMMFFRTLQKHMFFKEHTDLCTEYAQKIEASCYHYTYQQQEKTFLEEYSTRCGTINHIINCEKKSHQQQDNDALNKLISGELKPEAIGSMTFAELCPSAALKEKTEITLRSQQKVAEKTSQLYKCPNCKQRMCTYREVQTRALDEPSTIFCTCKKCGHEFIG

SEQ ID NO: 397 - protein, 72 aa, African swine fever virus
METQKLISMVKEALEKYQYPLTAKNIKVVIQKEHNVVLPTGSINSILYSNSELFEKIDKTNTIYPPLWIRKN

SEQ ID NO: 398 - protein, 329 aa, African swine fever virus
MLRVFIFFVFLGSGLTGRIKPQVTCKYFISENNTWYKYNVTILNSSIVLPAYNTIPSNAAGISCTCHDIDYLQKNNISIHYNTSILKTFQDIRIIRCGMKNISEIAGGFGKELKFLDLRYNDLQVIDYNILRKLIRSNTPTYLYYNNLMCGKRNCPLYYFLLKQEQTYLKRLPQFFLRRINFSNNNTFLYHFLSCGNKPGHEFLEYQTKYCRTKFPEINITVNQLIAKKNTERYKSCYPLVFISILCSCISFLFLFICLLRSICKKYSCTKQDKSSHNYIPLIPSYTFSLKKHRHPETAVVEDHTTSANSPIVYIPTTEEKKVSCSRRK

SEQ ID NO: 399 - protein, 212 aa, African swine fever virus
MVSRFLIAEYRHLIENPSENFKISVNEKDMTEWDVILRGPPDTFYEGGLFKAKIAFPPEYPYAPPRLTFTSEMWHPNIYSDGKLCISILHGDNAEEQGMTWSPAQKIDTILLSVISLLNEPNPDSPANVDAAKSYRKLLYKEDLESYPMEVKRTVKKSLDECSPEDIEYFKNAASNVPPIPSDAYEDECEEMEDDTYILTYDDEDEEEEDDE

SEQ ID NO: 400 - protein, 66 aa, African swine fever virus
MWKVNDQGFLNISVTGTKFNLIAITGKLGFYTDPPSHLIIMPLKFFPVHKFSKNEPNKKQKRFIYF

SEQ ID NO: 401 - protein, 27 aa, African swine fever virus
MYEIILAIIIILLTIIIFIFIKHPLNV

SEQ ID NO: 402 - protein, 202 aa, African swine fever virus
MLFRYLVWLFRFIEVKNVVSISLLVIGSNYLTTAISNNTSTTISPTTTSSNYLMTAISNNTSTTISPTTTSSNYLMTAIPNIISDKEDDIHFSTDKTVFDRLSPITLYRAIRSTLNDTSTKTMTDHILTRPYRPTTVIFHSDTPQPVKNATQGNIVKKIYRQVLTFFIQPNPLFPCFKNHEVFLNLANILNTILCIILIKNV

SEQ ID NO: 403 - protein, 238 aa, African swine fever virus
MARGQNIRKRTFSDMDTPSDKNIGIHTNSLPKNNLYRRILFKGKISNYSISKDSLAKDHSSNHSISKNGLIGKKRPAPLDISFQNMNSSISSSTQKKTRILDEEIKDQSLSNENDRDSPVIVDITLKPSYMSKTSRITEIIHKMKELNMNRIEDGSSFNKKRSEHDDKNILLHTMEMEEEDCEIEEDIAIDSPYLNTSLSEDDTDSIVGTDYSEEEKETISETESSSDDESYSLYDSF

SEQ ID NO: 404 - protein, 309 aa, African swine fever virus
MLSLQTIAKMAVATNTYSKYHYPILKVFGLWWKNNTLNGPIKICNHCNNIMVGEYPMCYNHGMSLDIALIRAVKERNISLVQLFTEWGGNIDYGALCANTPSMQRLCKSLGAKPPKGRMYMDALIHLSDTLNDNDLIRGYEIFDDNSVLDCVNLIRLKIMLTLKARIPLMEQLDQIALKQLLQRYWYAMAVQHNLTIAIHYFDNHIPNIKPFSLRCALYFNDPFKIHDACRTVNMDPNEMMNIACQQDLNFQSIYYCYLLGADINQAMLMSLKYGHLSNMWFCIDLGADAFKEAGALAEKKIKECYNTY

SEQ ID NO: 405 - protein, 48 aa, African swine fever virus
VLQHILGLNIFKRELIPPCKDPDPYQIQILLKNYILKNVSTVFTYYCQ

SEQ ID NO: 406 - protein, 542 aa, African swine fever virus
MFSLQKKALQHIYMTPENASQLTKDLLQHLGLYWNGPIVKMDTVIHLHNNIFSNRSVLKYALAKQANISIIETLVLWVEPEYALAQALKHNRKDVLECIFSYHLTTPKYHHIMHLTSSQELFEFFHLFICKSKNYNARMECLLYAATLYNFPNILEKNREYIIRHSIGNSLFAIACKERHIHLIAWFVTAGVLDTYDDSTLFNTAFRLGDYSLLEVACDLPIIYPDYLIISMMQTAIQKNYFRFFKKLLTHFNIYRPIIITDAAYYNRRKILLLLLNQNVFNNFAILCALSAAIKGHASKKTLNLLISQLDSQMTVIDSVYYSIIKYNNIDCILLLMQIKTFRLETLVSIAVHGDNIDIIAACKAFLPKDTLYHLVLKMAIISRNHKLFKLYTEKENPMYIFTTMKAIISNLVNYTVVQAVAIEYLRKFHQEKQLPIVPLLMVLAEHNYITKFKKACYAANMSDQKVKRALIKCLFIASQKNYCQIFKYCFGSLLKVLSKHERVKFFNSVVFAKKLASYYDHQNMIHLIDSLIERFRYLIKD

SEQ ID NO: 407 - protein, 141 aa, African swine fever virus
MGNKESKYLEMCSEEAWLNIPNIFKCIFIRKLFYNKWLKYQEKKLKKSLKLLSFYHPKKDFVGIRDMLQMAPGGSYFITDNMTEEFLMLVVKHPEDGSAEFTKLCLKGSCIVIDGYYYDNLHIFISETPDIYKYPLIRYDR

SEQ ID NO: 408 - protein, 102 aa, African swine fever virus
MGNHPIKQDMKTCDYYHGEKKLKYMRRMLYNEPLGTYAVSSLFGCDMIVLTWNCTISGRTLHRRIHTRFGQYYHNNCYYTKIDDIIGDYPDTFYRPLYRYKP

SEQ ID NO: 409 - protein, 103 aa, African swine fever virus
MGNRLIKKDLKKCEYYYGEQQNLKQIWRLLFNEPLGTYVVSSFLKKNYVVISFSCPTNTRIMHLRINICYDLYCINGEYYEKIDDFIRLYPHIFYRPLYRYKS

SEQ ID NO: 410 - protein, 45 aa, African swine fever virus
MYFQQTRSILIKNDAVFILNLGLKFKEVFINYNHGNFFSNCLCKK

SEQ ID NO: 411 - protein, 96 aa, African swine fever virus
MGTFSVTASAKSDDAVCKYLEEPIDENYRNILRNEHVKKNLNEALNRHITTYNPVVDWCNNYSTFSSQDFDEYKIYIHSDLMDGRPRPKKTWCVIM

SEQ ID NO: 412 - protein, 170 aa, African swine fever virus
MFYPVVQVLIGIILVIILILGFYHLKHKPPKKKCKTDTDCKDKGHHCVRGTCTDKSCLEAVKQDIKDIKLDPTIRSCDYAPGFYRFNATTADLQSPFGKTRIDLGRIWTTWSKEDECCQSLCLQHKGCIGWEFDEVSLGGTGECYYYLNPHLALKNSNNNTVMGIARNVL

SEQ ID NO: 413 - protein, 93 aa, African swine fever virus
MDFFLLKKIFFFVDNRMLEPMLVMAPIPLVLIFLYSYFKIKLHKLITIALFLGCLFFILRDFCFPPMLWTQLHNITSSINILGNKSFQVQCNK

SEQ ID NO: 414 - protein, 237 aa, African swine fever virus
MLEIVLATLLGDLQRLRVLTPQQRAVAFFRANTKELEDFLCSDGQSEEVLSGPLLNRLLEPSGPLDILTGYHLFRQNPKAGQLRGLEVKMLERLYDANIYNILSRLRPEKVRNKAIELYWVFRAIHICHAPLVLDIVRYEEPDFAELAFICAAYFGEPQVMYLLYKYMPLTRAVLTDAIRISLESNNQVGICYAYLMGGSLKGLVSAPLRKRLRAKLRSQRKKKDVLSPHDFLLLLQ

SEQ ID NO: 415 - protein, 70 aa, African swine fever virus
MGRRRKKRTNDAKHVHFATAVEVWEADDIERKGPWEQVAVDRFRFQRRIASVEELLSAVLLRQKKLLEQQ

SEQ ID NO: 416 - protein, 96 aa, African swine fever virus
MSTHDCSLKEKPVDMNDISEKSVVVDNAPEKPAGANHIPEKSAREMTSSEWIAEYWKGIKRGNDVPCCCPRKMTSADKKFSVFGKGSLMRSIQKNN

SEQ ID NO: 417 - protein, 43 aa, African swine fever virus
MDIWYLKYVIAYILLLTMLVIGLIYRIIVLIYRSIQAQKKCCL

SEQ ID NO: 418 - protein, 43 aa, African swine fever virus
MVAFKNIKKTLSFRQQQIVCRRPQTIFRVFCTIKYFFWSGLLL

SEQ ID NO: 419 - protein, 356 aa, African swine fever virus
MSTPLSLQTLVKKVLATQHISKEHYFILKYCGLWWHEAPITICIDEDSQILIKSASFKEGLSLDIALMKVVQENNHDLIELFTKWGADINSSLVTVNTEYTRNLCQKLGAKEALNERDILQIFYKTRHLKTSSNIILYNELFSNNLLFQNIERLSLIVYRGLKNLSINFILDDISFSEMLTRYWYSMAILYNLTEAIQYFYQRYRHFKDWRLICGLSFNNLSDLHEVYNLEKTDIDIDEMMKLTCSTYDGNYSTIYYCFMLGADINRAMLTSVINFHIGNLFLCIDLGADAFEDSMELAKQKNNNILVEILSFKNYYSSNTSLLSIKTTDPEKINALLDEEKYESKNMLMYEELSH

SEQ ID NO: 420 - protein, 64 aa, African swine fever virus
MIKKKNYFFGQHLFVRIVDKSAGNNNIYNFFLGEKNNYVTSYIPIGDLSPSESSVIKNNFVSMR

SEQ ID NO: 421 - protein, 48 aa, African swine fever virus
MNIYLVWFLYILLGNLILAVIYCVIDEVVCDNIHIKKNVAAPEMPRRF

SEQ ID NO: 422 - protein, 54 aa, African swine fever virus
MSLWPPQKKVFTVGFITGGVTPVMVNFVWPAAQPQKKINYNRKKKYFRPRRFKK

SEQ ID NO: 423 - DNA, 32767 bp, African swine fever virus
gaatataccatattattgctattgccatcaatgagaatgccacgtaggcataggtcatcctatggccggaccaatccatggctgcacttaaaaatatcaaaaaagtttaagttttgggccggcgttaaaatttaaaccttttctggttgatctttagccatgtatagctgcgatgtttggtgccttatctacatgctattggcattcctgatattcgcactaaagtgctatgttacaaccgtcttatgcgtgatttttatccaccttattggccgaagggccgccttgtatttcctgttaggtggtttggccgtattctactggtggcaagcagctatcaataaaatttaatggctctcacttaagatccttgctgtaagcgggcgtttacatactttgatcaagaaaaaaattatttttggacccccccccagttttatcaaaaatcatataataaagtggcgacaatcaacatattaatcaaccacagcattttatgatgtgttaatcaacatataccatattaatcaaccacagcattttatgatgcgtcaatcaacatattattacggagagcgtcaatcaatataatattgagaacagcgacttgataccgtgtatggtggtggcggcggcatgttgtttgtaacagcatttttcatcattcgaagcttacaaaagatatgtataagatagcatattaatgttattaacagtaatatcaataaggcgtagctatagatcttcactttggtagaccaataatccatggttgcgcttaaaaataccaaaaaaaacattaagttttggagggtaagattggtttttcaccattggtaaagattattattctaaatgtttaccccatagatgtgaaacaatgattcttcatatattaacatattttttgacttatacttttcttcatctagtaaggcgttaattttttccggatctgtcgtttttattgataaaagagaagagtctggactgtaatttttaaataataagatatttattaatatccaattattcgtttggctcgctatttccatgctctcttcgaaagcatcagctcctaaatctatacaaaggaataagttaccttcacaaaaattcattaccgaggtaatcattgcccgattaatgtcagcccccaacataaaacaataatatatagttgtataattacaatcatacatacaggccaactgcatcatttcatcaatgtctatatttgtcttctctttgttataaatttcatgaaggtcaaagacgttgttataagcaaccccacatattaaccgccaatctttaaaatgactatatcgttgataaaaatattggatggcttcagtaagcttatatagtatcgccatactataccaatacctagttagcatttcgttgaatgaaatattatccaatgtaaagttaattgataatgtatctagttcaccaaaaattcttaatttcagttgagcattatttaggaaaaggggattatcagataataattcatggcatagaataatattactgctagttttaacatactgtacattataaaatatttctaaaattttattttcactcaaagctttttcctcgcacctaactttggcataggtcctggtgcactccatattgacagtaaccaacccaaagctgatgtctgcaccccattcggtaaacagctctattaaaccatgattgttttcctgtacagccttcattaatgcaacatttaatgttaaaccatgtttaaaacttgctgtttttattaatatttgttcatctatacaagtatgataaatcgtaattggggcttcatgccaccacaaaccacaacgctctaaaatacaataatcatcttttaacacaggctgtgtagctagtacttttttagtaagtgcttgtaaagtagatggcatcttctatctgcaaaataattatttccgaaaaaaaaatcaaattaaaatactaaattctatttttttttttaataaagcctgtaaattatataataaatctcgcccaccgtattatttccggacacaactttttatacctcattatatttttagatctatagttttttaacaaggcattaattttttctggatctgtcgtttttaaagataaaagagagacgtttgaactataataatctttaaatgataatatttctactaatatatcatgattcttttgttttgctaattctaagctctcttcgaaagcattagctcctaaatctatacaaaagaacaagttattcatataaaagttttttaccgaggtaaccattgcccgattgatgtcagcccccaatacaaaacaatagtaaatggttaaaaaattgctatctctcatacaggccagatatatcatttcatcaatattcatatcaaccttttttatatgatacatttcatgaagatcagacacgttattaaaagaaagcccacatattagccgccaatctttaaaatgactatatcgttgataaaaatattggatggcttcagtaagcttacatagtatcgctatactataccaatatctagttagcatttcgttgaatgttatttcattcaatataaagttgatcgatatcttctctagaaaacaacaaattattacttttaattcctctatattctggaaaaggggattattagataacaatttatggcataaaataatattactactagttttaatacgatgtattttataaaatatttgtacaatatccatttcattcaaaatttttgcgcctaactcccggcagaaattccaagtatgctccgtattgacagtgactaagctagagttgatgtctgcaccccattcagtaaacaactctattagatcatagttgttttcctgcacagttttcattaatgcgagatttaactctaaaccatctttaaaaattgctgattttatcatcaattgattatcctcattagtagaaagcataattggagctccatgccaccacaaaccacaatatttcaaaataaagtagtgttctttagatatgtgctgtgtggccagtatttttttagcaagagcctgcagagaaattggagtagacatatttttttttgcaaaatggtttaagtttttcaagaatacagattggataaattaggttgttgacttagttacaggaggtattaaatattatgtagacataaaaatgagatcctccaaaaaaataaacaacaaaaaaaatatgtttaatattaaaatgacaatttctacattgcttattgctcttattatactacttattattattttagtagtgtttttatactataagaaacaacaaccaccgaaaaaggtctgtaaagtagataaagattgtggtagtggagagcattgtgttcgtggatcatgtagctcattgagctgcttagatgccgtaaaaatggacaaacgaaatattaagatagattctaagatttcctcatgcgaattcactcccaatttttaccgttttacggatactgctgctgatgagcagcaagaatttggaaaaacacggcatcctataaaaataactccatctccaagtgaatcccatagcccccaagaggtgtgtgaaaaatattgttcatggggaaccgatgactgtacaggttgggaatatgttggtgatgaaaaggagggaacatgttatgtatataataatccacatcacccggttcttaaatatggtaaggatcacatcatagccttacctagaaatcataaacatgcataaataaatacattaggctcatcgtatctttttaaaatccataaatattcgtttgatatatgctgaaatttttataaaaaaaataactatttcctataaatcatctagaaatagtcctcgttttgatcggtttatatcttataatattgtgcatcgatgcacaactgctttttttggtccttctggaacatcattatattttctttcattaatataccattcagatgtaaacgttgaataatttttatggcaacaatctaccattgaattatatttagtaacatctaatacatcgtttgttttatcaggctcagctctataatcttgataatttttgttatcagcttctaaagctccatcattatttttcaaagaagtatccataattatgtttggtaaaaatactttaagttttaatgtgatatttaaaatggttgttatataaatttaccgcttacaggtaatctttattcagtgtcataaactatacttttgatgattcagtattttgtgaatcagtacatttattatcattaatatttttaggctgtttttccaatgttttattgttgcaatgagcctgctcctcctttgacgaggaagtgtctgttggagtcatctgtttaggaagagtatcatccatatctattatgaagaaaatatataaatattgatatacaatcaaaaatatttttgatcacgtctttgttatctatcgatattgttgataacgtcttgaataacctacatcatttttttacataaaaaaatagatataatttttattatatctcaattattttaaagataattatcaatacagcaaatatcataagctaacatatttttcgaataatagttttttagtaaagtattaatcttttcaggattggtttcttttgataataagataggattcgctttataaatttttaaagataatatattcacaatgatagaataaccgtatatatctgctaatgtcttactgtgttcaataacattagcccctaaatccatacaaaagaacatattttcaatacaaaagttttttaccgagattaacattgctcgattagcgttggctcccaatgcaaaacagtagtaaatggtcaaaaaattattatcgcgcatacaggccagctccatcattttattaatactcatatgaattttcgttgtgttacatatttcatgaaggtcaaacacattgttgaaagaaagtgcacaaattaatcgccattcatcaaaatgcctgtattcttgacaaaaatattgaatagcttctttaagattatattttaccgctatgccataccaatatttggttagcatctcactaaatgagatctcatttaacatagaatttgttgttaaatccttcaactcccaataaatgatcatccttaaatccaccatgtttacattttgtaaaaaagggttattagaaaataattcatgacacaaaatgacattactacttgttattttacactttgtttcaaagaaaaatcgtaaaatttcacttgtctcaagctcttctttagctcccaattttcggcataggtttcgagtatgctcgttattaataaaaagtaacccataattaatatttgcaccccattcagtaaacaacatgattagatcatcattgttttccttaactgccaataccaatgcagtattaagccttataccctctttaaagcataatgtccttatcattatttgattatcatcatctatatacattgagataggagcttcatgccaccataaaccataacgctctaaaatataataatcatctttagatacgtgttgcgtggccaatgcccttttagcaagtgcttgtaaagtcgatggctgcatgtttattctgttaaaaaaaatcaaattatcgggtaaacataaggatcaacccgtagttaatatttgcagtagtattttttaacaatgaattataataaaaaaataattcattactatctattataaaacccatctttaactttaaagaagaactagatcatcttttttttgttgtgtcagaacttcttcaatttattacccacattttatctaaaaaaataaaaactacatcatatcttgtttcttcatcaaattatcataccatttatagggtgtaggttgggaacattccatcatgtggtaatcagggtatttatatattttttgatagtaacatctatttggcagatgtattgtccaacaatcatgtctaataaaatcattttcacctatgggggaatcatcttaaaaaccttattcctacagattccattttgacagtcccagcaaaagtcacaatattttccatgagtacaccaatgttcaagctctctttcgggaggaatgctgccaattttatgttttttagcttctaactctctgtacaacatcagttgggaaagcagaaagaagattaccaggagaaccattaaatatataatagtctgcaaactacgtttgcgaatgtaatttgcaactaaaacacaacccacaaggtaaaatccataagttaataacttttgccattttcgtatgacagcctcgtgccattcatggttgtgttgtgggcattctgttcggtaaacttcatgaggctttatagaagttacatagtaggtacagaattcattgtgacgaaaaacactgcagttagctatgtagtcattttcaagaatgggagaatggttttcaaagaccttattcttacagatgccatcttgacagtcccaacagaacctacaatgatttgcataggtgcaccagtattcaagctccttttcaggaggggttcttgttagatccaggagctctagctcatatgtataaagaagagttggaatggatagtaaagtaaatatttgcagaccaagcatggctacttgtgaacaagtggctgctcgtcaacaaatagctgtttatcagcaaatagctgtttatcagcaacaactaattatcagcaaatgctgcttgtgggtaagccaataaataggccatacccttgaaaggagaattcagtttgataaaaaaaataacgagttttctaataacccggtcaagcatttaataaatgaatagcatcacacgtctgcatcgtgcattctgcctggaaaatgggcccatctctaatatatttacactgacggtgaatcatacagtgttccatgggatagctatgctcctgtacaggaggcatatcttttagaactttattcttacaaagaccatcttgacaagcccagcaaaaccgacaatttttcacatattgacaccagtatctaagctcctcttccaggggattgtcggtcgaaaacccctgtagactagctaggccagctagcagcaagccgaggtaactaaagaacctcattgtagtgttatattacgaaaaaacatgttaaaatttggaaaaaaaagccctttttatagatctggaaaaaaattttcacaaatctaattaaaagccttacagatcatccttttcataaattttcattaacaattggtgggggcggttgtgaggtactggatcagaacaatccataacatggtaatgtccatttccttcaccatatgtacactggttataccagcgagaaacctcacaagatgtcaaataactgttctcaacaatcaatggcatgctcttattcaccttgttcttgcaaattccatgtgcacattcccagcaaaacttgcagttttccatgtaagtacaccagtatccaagttcttcttgtggaggattatccgttgaacgaagatgccctcctgcctgagtaggtagtcctaagacctgattggccagcaggccaagaatttccaagaagatcaccaacattgctacggctggctgaacagctggcagatagctagctaattagcaaaccaagtgactcgccctctctactcttaatatgagaatttaagattcggtccggcttttttcccatgttttacagggaaaaggtatttttagcctatgaatgtacatggttccgcacattaaaaaaaataaaagaaattatttaatattggctgttattttctttcaactagcaacaagccaggtaactaaagaacttcattgtagttttatattacggaaaaggttaaattttggacaaaaaaatcatatctaattaaaaatcctcacagatctttcttttcataaattttcattaacaattggtaggggcggttgtgaggtactggatcagaacaatccataacatggtaatgcccatttccttcaccatatgtacactggttataccagcgagaaacctcacatgttgtcaagtagctgttttcaataatcaatggcatgctattattcaccttgttcttgcaaattccatgtgcacattcccagcaaaacttgcacctttccatgtaagtgcaccagtatccaagttcttcttgtggaggattatccgttgaacgaagatgccctcctgcctgagtaggtagtcctacgacctgattggccagcaggccaagaattcccaagaagactaccaacattgctacggctggctgaacagctggcagatagctagctaattagcaaaccaagtgactcaccctctctactcttaatatgagaatttaagatccggtccgacatttttccgatattttacaagaaaaagatatttttagctacaaatacacttcatatatccctaaaaaaacaaaaatttatttaattttaactattattttctttccactctctctttaagattttgtaaggattccagggctttggttcagaacaggccattacatggtgaatcccctgtcctagatcatacatacatttatttagccagcgggaaactatacatgattgcacatactcattttcaagaattgttgtattctccaatttgccctcacaaaggccattttgacaattccagcaaaacttgcagttttctgtataagtgcaccagtattcaagttcttcttgtggaggattatccgttggatgaagttgtccagctggttgattaggtagccctaagacctggttgcaattcatggtatggtagatacccttatctaaatcatacatacatttatccagccaacgggaaaccagacatgatttcacatactcattcttgtaaattactgacccatctattttgtttatacaagtgccgtcttggcagtcccagcaaaattggcaactttccatgtaggcacaccagtattcgagttcttcctctggaggctcctctgttggacgaagttgtccaacgagctgacttgaaacctggctggccagaaggccaagaattcccaagaagatcaccaacattgctacggctggctgaacagctgactgaatagctagccaattagcaatccactgtacttttcataagatcatttaagattcggtcggcattttttcaatagtttgctaggaaaaaatttttaattttatagattcacactacttcattctcatgcttaggaaaaaaacaaactaaatcttacaatgtatctggatctaatgagaagctagaattcatcttttttcaaatcctttctgggatgttcattctttttccactccttccttgcaattttataaggattccagggctttgggtcagaacagttcatgctatggtaaatgtgctcctccacatcatatctacataggtcaccccagcgggaaacctcacaatattttacatagtcattctcaataatacttgtggagttgtttccccaaaccctgctggtacaaatcccatcttcacaatcccagcagaaccgacagctttccacataagtgcaccagtatccaagttcattctctgggggttcaaatgttagaggaagatgtccacctacccgagtagaagtggaggatgaaaccaggttgctactggccagcaggccaataattcccaggataatcaccagcattgtgctcaaccagcaacggctagcaacgactagcaactgactagcaatagctagaaatggctagcaatcagtagtagctaacgctctactctttataagaaaatttaaaattcgatcagatttttttagaattgagaatgagtaaaacgcttatattctttttctagctagaaaaaataagctagtttaagataggatttcccttactaacggtttaatttttagcaaaggtataggtaaaatacacttgtacttagctgcaaaaaaataagcttatggcgtataagccgccataagtttatttaattaaaatgttaaactctgtgataagactggaatcttaggcaggtttgatgtggagaacagcatgaaatacaagagtgcctgttacacgaataagttctctcaaaccggggatggtcatactcacatctatgaaatcctggtctaggagattcatttgatgcatgatggccgcacccacacttatgagacactgaagaactaaagggtttaattttgatctgaatggtactatataggatgatggcaatccatatcaagattagagcaatcaaaatcacctcctcaagaagcatgatgtagccttaaatcttagactgctttaaaccttaggccctcactatctttaatgaaggagtttaaattttgatccctttttcaagacccatttagaagaaaaaataaagtttatatcaatctaattcataagtcatctctttcataaatcttcatgtattctctatgtggataagtatgggatgttggatttgcgcagtccatttgatgatctgtatggtttttgggtccttcataataactacatataccattccagcgggaaaccgtgcaatttataatccagtcattttgatgaataactggccaatctgtttgaatcctgtttcggcagataccgtggacgcattcccagcaaaagtcacattggtttgcgtaagtgcaccaataaactagctcatgttcaggaggataacgggttggtagtaaatcttctaatttacgtataggagcggcttgaaggacaaccacccccagtagtactagaatcagtacctttatagtggccaccctacactagacctctaagttgaagacaaagaactaaaatttagagccgtttaattactactaataattatattttttattgtctacaataggattctattaaaaaataatgatttttaccaagaaatatttttataaaaaattaatatattttgtaataaactttatttccaatgactgttaaaataaggaaactatccttagttagtcgaggaagatggttaggttatttcgcaatccgataaaatgtttattttatcgtaggtctcgtaaaatccaggaaaaaaaattacggaagagtttaaaaaagctaaatttttaccaccctccagaagattgttgtcaaatatatcgtttgctagaaaatgttcctggaggaacttactttattacagaaaatatgacgaatgatttaattatggtcgtaaaggattcggtggataaaaaaattaaaagcattaaattatatcttcatggaagttatattaagattcatcagcactattatattaatatttatatgtatcttatgagatatacccaaatttataaatatcccttaatttgttttaacaaatattataacatctaagtaaatattcttggaatggattttcttatagaatggttacaggatatgtcagcgacaggcttaataacaaatttgttaatatttttttgttaaataaatgaacaggccaccatttaatattacccgttgcaaaataagaaaaaaaaacaaacttatagttacaaatcatcttgattaatcacatgtcgttttaactcaatgaaccattctaaatctttgggttgtgaacaattcatgttatgttgatagtgtatcctaaagtgagcttcatacatacaccggtcatgccaccgggaaactgtacaattaacaatataatcattttgcgtaataatagggtggtcactaaacactttatttttacacattccatctttacaggtccagcagaagtcacagtgttttgcataggtgcaccagaacttgagatccctttcaggaggcctacgcatttgcatcggattatctgtggaaagaggtaggttcattattatgttcgtcatcaaaattcctaaaagaacatagaagccaagaaagataagcagtcttgtagcggcttgcattcgcattcgtgagtattgtttgcgaacatagcttatgagagcaatggtagctatcatacaaagacaagtatgtttgatattctcagtgtcaatgaccctatcctcctttatttgcattaactcatcaaaccaatcataatatgtgggatttgtacagctcatgatgtgaaagcggcgtatcctagagtctgtaaagtagctacatctttcattatagcgagaaaccctacatatttgtatgtaatcattttttttgatgagagggtgtttttcaaaaaccttatttttacaaaccccgtgtcgacaattccagcagaagtcacacgattttgcataggtgcaccaatactcaagctctctctttggaggtctccgggtcattggtaactctcctgttcctggaaaagattggctttgaatgaccggctgcatgaccgccagtaccaaaaggaacacaatcaccttcatggctgcaacttataagttgcaacttatgggttgcaatactgcaacgtataggttgcaccttatagatcgcgactcaaaaggtatgaaaaccttaccctcaatacagaatttaagttttaatcctgataatgtatctgtttatgaaaaaaaattttttttactcatgtatgaattcttatacgaatcataatatgtaggctgagaataataattcatatacggtgttgcgggctcaataaaaattttgttaccacaaaaaataaatgctggatttttaagatatatatctattaatgactaaaccctttatacgctgtaggctgaaaacaatccatataatgaatatacggtgatttgggtttaataaaatacatacaacggtcaaaatagcgggcaatactacattgactaatataatcattttgtttaataagaggcatatcatcccacactttatttttacaaataccgttcctacattcccagcagaaatcacagtgttttccatacgtgcaccagtattcaagctctcttataggaggcgtataagtccttggtaaattttgtttcatataaaagatggaaaggggtcgatttaaacccggctgagatagccaaatcaaaatacataaaagagcaagtagtttcatagtggtatttagatgtaaatttttatagtatgcaaatacaatgtaacctacaaatacaatactaaatacaaggtaaaaacaacaatgtcttataatgattggccaataatcaccccccccccccccatttttccatgaatatttcatttcctgtatagggtctaggatgtgaacactccatgttatgatgattaggcattttaactgatatttcataaaaacacccccaggaattgcgattaactatacagtttacaatcgaattcatcgaattagactcatttgttatcttatttttacaaatgccattttgacaatcccagcagaagtcacaattctttacatacgtacaccaatatggaagctcctccttaggaggatgctgggttcttggtaattctggtaattcatgtgcaagaatgaggactgagtagcccaacaaaagtcctagaaccttcatgttgtgtccaaatggcacctgtcattttaaaaaagatttaaattttgctaccgcaaaaaaaatccagtatgtatttttttaatacatataattattgaagtcttataagataaagccgagaacactatattttgtatagatgatgtatccggtattcaaactctcttataagtacatgtaggaaatggtcaattattcaagattggctgagataacaacaaaaccaaaatactcaaaagcataagtaatttcatggttgtactcagtcgtagatttttgcagatcgcaaatgcaacgcaaccagcaaatacaaagctaaatacaaggtaaaaacaataataccttataatgattggccaattcttatccctccatttttccatgaacatttcatgttcataaagtctaggatacgaacaacatttcatgctatgatgattaggtattttaagtgatatttcataaaaacaccacggggttgttggtgattgataggtaagaataaggatggttgaataacctagtaaaagtcctagaaaaaccttcatattgcgttcataccacagatgttatttaaaaaaaatataaattttacagtatgtgatatacacataccacaaaaatgttcttatattaactaaaatatgtgggcagagagcaattcatataatgaatatatggtattttaggctcaataaagtacatacaacgatcaataaaacgggtaatactacatttactgatgtaatcattttgaacaataagaggcatatcatccaaaaccttatttttacaaataccattcttacaatcccagcagaaatcacagtgttttccatacgtacaccaatattcaagttctctcataggaggcgtataggtccttggtaaaatttgtttcgtataaaagatggaaaggggtcgatttaaaactggctgtgctaaccaaaccaaaatactcaaaagaacgaaaagtttcatggttgtactcagacgcagattcttacaaagcgcacatacaaagcagcctgtatatgcaataccaatgatgaaatagagacagtattgctttatagataattgttgatggtcaccccccccccccccccatgtttgcatgaatatttcatttcctgtatagggtctaggatgtaaacattccatgctaaagtgattaggcattttagatgaaatttcatataaacaggattgagtcttggaatcacggaaaactctacagtttacaatagaatgattggagtcaatgaaacgagattccgttatcttatttttgcaaatgccatcttgacagtcccaacagaaatcgcattgtggtacatacgtacaccaatatgaaagctcactcttgggaggatgctgggttcttggtaagtctggtaattcatgtgcgagaatgaggactgagtagcccaacaaaagtcccagaagaaccttcatgttgcgtctaaatgacacctgcacttacaaaaaaaaatttaaattttgaatataacacaaaaaaaccaccttaaaatttcttatattatttcttggatctgccccgacgtcatacaatgtattaaaattatagaccaatcatctttttgtatataggctaatcatctttatatatagattttagatgtttgcttgttgtatcaacttaactgctagcgaagaaaatggataaaaactttctgtatttttataggttgaaatcattttatgcacatcgctaggatctaatattttattttgaagaaccgaatgtgggcttaaaatttttttcttagaaaaaagtagaatcataatattgctatgtttttgtttaatgatttcttgtatcttttttgtatacgggttggcacccaaacctatacaaaaatatacattactcaaataactaccttctatacataatcttttttccccacgtattttcctatttatttccctatttatggaattaaaggatatcaatctctctaaggcacggtcaaggtctgcgcctaaggcaaaacaataatatatacctaatttattcccagggcgtgcacaggcaagaaacatcatgacgtttagccctaaacgtatattttcctgaaaatacgcatgatgaacttcatcaatattacctaagtatatggccgtttgtaaacgccaaagatctaaatgaggaaattttttactaagataatgaataggttttgtgagattaaaatctatggcgaacttataccaaaattttaatacaagtgtatttctcgtcatttcttcttctttttcatctaaatataagataaaacgattgtaaacaaagtctatcaataggtgaaaatcattgctattaaagctgtcgagaatcaaaatattgtcataataaatttcgatcgccagtaaaaccttttttcgtttgacgagataaacaaacatattatacaaccctacatctaaaaattctggattggctcctagttggatacacaggtctttagtctgcttcgttttggcacacatgatgccaaaattaatatcagcaccccataaaacaaataacttgattagatcagtctggttttccttcacagcttttactaaggctctgtcaagctcatagctgtcgacatcagagcatgacatagagccaccggttaccattttacattgcttacaaaaacctatgggtccgttttcccaccatagtccaagctgttgtagaataaaaatatcatcctcatgataatttgaaaaagccttggtttctatcaagactttttttgtaagaacctgtaaagagttcatcgtattattatgaataacaggagtaaacgtaatcaattataaaagtgattttttcgaaaaaaactttagatggttgaaaatgataatgtacatgttcatacaaaaaatagatgcagtgatgtctaaaatcaaaatttaattttctatgtaaaaagtacagacttacttatttgggttaaattgtttattttaaactttaattaaccgtttgagttagcgatgtttgatttatcttccatactcatccggggggggggggtccttatagctctgacattattgtggattattgaatataatgaatacttcatagatgctaaacattttaatagtagttctgaggcttaattgtactctataaatttataaaaactttttgatcaaaatttaatttcttataaaaagagtacagacgtcgcttgtttaagcttcatcatgtttcattcattactttctacaattacggggggggggagtcccctcatagctttagtattgctatggtttactaattattatgtagaatttatagaagcatatgtacctgaaagtatacctactctataaaattaaataatttcagtatattttttttatgaatagaacggaaatgatataaaaataatttaatattgcaaaaaaaattcataatgttggtatgtattataaacataatagcatgtgtaatttataaactgactcctctatataattattagatgaggtaccaacctacttatgatatgccgatgatagatattgtatactataaaacaaaattattttaaatgtattcatggatacattataacatttttaccgcaaattgtctctcagcgaagaaaatgaatgaaacgtttctgtatattcataggttgaaattattttacgcacttcactaggttctaatattttcttatgaagtattgaatgggggcttaaaagtcctttcttaaaaagaagtttcatcataacattcttttcttgtctaagaagagtttcttgtattttttttgtataaggattggcacccaaacttatacaaaaatgtacattactccaaataccataatttgaaaagaaagttatttccctatttacttcatgattaatgaaacctatcaacgtctctaaggccgtattgatatttgcgcctaaggcaaaacaatagtatatacccaatttattttgagggtacatacaagcaagcgacatcatgtcatttggatctaaacgtatattttcctgaaaatatgcatgatggatttcatcaacattacctaagtatacagccgtttttaaacgccaataatctaggtgaggaaatttcttactaagaaaacgaataggttttataagattaaactctatggcgatcttaaaccaaaattttaatacatatgtattttttatcattttttctttttcatctaaatttaagataaaacgattgtaaataaagtctatcaacacgtaaaaatcatggctatcaaaactgtcgagaatcgaaatattgtcataataaatatctatagctaataagaccttttgttgtttaattagatcaacaaacatattatacaaccctacatctaaaaattttggatcagctcctagttgaatacacagaactttcgtcctttccgtcttggcacatatgatgccataattaatgttggcaccccataaaacaaataacttgattagatcagtctggtttttcttcacagccctcaccaaggctctgtcaagctcatagctgtcaacatcagaacatgacatagagccactggttaccattttacattgtttacaaaaacctatgggtccgttttcccaccataatccaagctgctgtaaaataaaaatatcatcctcatgataatttgaaaaagccttgttttctatcaagactttttttgtaagaacctgtaaagaattcatcgtattatcatgaatgaaagcagtaaatgtaatcaattataaaattgacttattgaagagaaatgttaaatgagtgaaatcggtgtttatgatgatgtacatgatcatacgaagaaacacgttcactggtgtccatgatcaaaatttaatgttttacgtaaaaagtacagatgttaactgtttagtttaaacataaatttaacctttagtttaaaccctagttaatgatgtttaatatttcttctatactcattcagggaagtgtaatgattctaatactgttgttatggattattaatgaaaactttacagatgctggagggaataattttaatcatactgttttaatgtagctatataagctttcatcaaaatttaattttttttataaaaatacacgaattaaactaaagtctaaactttagtttgactatttgagttaatgatgcttaacttatcttccatgcttatcaagggggggtcctaatagttttgatactattgttgtggattgttgaatataataaatactttatagatgctgaaatgtttgaaaataatagtacatcaatgttgtaagtttgatcaaaatttaatttctcataaaaaaggtacacatcaacattgctcatttaagtttcatgatgtttgattcattacttcctacaattactgggggggggggggggtctttaatagctttagcattgttatggtttgctgactattatgtagaattcatagaagcacgtttagatagtaatatcactgcagtgtagattatgaaatacatactaaactaatttcagtatattttttttgttcatataagttaaggtacaaaaatgattaaacattgcaaaaaaagaaaatcacaatgctattatacatagtgatcatagtggcttgtatcatttctaaactagttccaaatgaatattgggcaatacatctattttttatcattatgatttttatggtatatatgtatgaaaagttagatatacatcaaaaatctcagttctggaattataccatgtcaggcttatctggacataacgtacaggtaacatgtaagtgttactaaatactatgaagtatctattttttttgttgtaaaaaaaagaacttgatagtattttttaaaaaataaaataattaattgtacgtcaacttccttattttattctttaaaaataactcgtaagtattatttatctattttttgaaaaaatagatgtaatcggtttcatcatttaggtgtgtatttctttttagcatctatcaagaattcattgtttagtgatatgaaaacaatgaatgatcattatcttctatttaacaaccacctaaataaatgaacgtctttttcatcttaactgattaccaaaagttattttgcgaaaaggcatacatatgatcaatatcagacctacaatgaatatttccataatatccctttattgtaataattctatttttgcattccgatatctcatcatctgtgctattatatgtttccataactgtttcatcatcaaacataaatcctgttaaataggcaaaagactttaatcccggatagatttttaccattttcctgagagccgtgtatagcttgtaataaatggccaaaaatatgcaataaagcgtagaaagagagtaatttttggcataaaagattttgaaggtttgatgaatggctaaatcgcatataatataagatacgattttaaagcgcacctgttcacgcagatttgttgaaaaattcgtggaaagatttaacaaataaaaggttattaatagttgctcatcattccccttatacgacatcgtcagacgctctaatattttactactaggcacatctgccacatgttgaacatttaaagcctgttcttcttctgtgttacggcaaaagagccgtgcgtattcaggtgaagctccccaggataacaacgtccttgctacggctaaattttttttgacgatgacttttatcagaaataagtctttatttttgcattgatcactatgcgaatttgtatagttgacgccgttgcattgagtacattgatataatgttttacaattccagcgtagccctaaatggtataaaagaactgtattttcgacataagcatgctgattaacgatgtttttgagacaacacgtcgttaaggacaccatattgtctccaatttgttagataaaagtctttactaaaaaaatagatttttagttttaacaatcgagattttattatttggatgcatcatcaaaaagatttataagtataagaggttgtataagaaaaaaatgatgttatactatttatgttaaaatttaatttatcatataaaaagtacagatttaatcagttggttaaactatttagttaattaaactaaatagtttaaccatttagtcagactacttggttagcaatgtttgagctttcttccattcttatccgggggggggggtcctaatcgttctaatactattgtggatagttgaatataatgaagactttatagatgctataatgatgaattctagtatgcctgtataaaataattaacctttttgatcaaaatttaatttttttataaaaagctacagagtagtgttttattaaacgtggcttatttaaaagttacacaatgttaaaatctctacttactttaattctttgtggggttttattaactttatccatattatggcttactacttaccatgtagaacttatagaggcaatagatgatttctacgactgaaatatagaatagtccattttctatttgtaaaataatgatttatattctttcctaaaaatgatactttatatggtttgaaaacaaatattaacaacttgatttttttttctataaataaactataaatgaaaatagtaaaactcatagagtcttataagtgaacatcttcataatgttactcaaacgttggactattaaaaaatattccgtgtgcattattgcttttaatcagtatgattactttatacgaagccgctattaaaacgcttatcacacaccgaaaacaaattttaaaacaccccgatagccgtgaaattttactagctttggggttgtactgggataaaactcatattcttgttaaatgtcgtgaatgtgggaatatgagtcttaccggaaaacacagtacaaaatgtattaacattaattgtctacttattcttgccataaaaaaaagaataagcgtattgttgataccttgataggaatgggcgcggatgtaacatatatacatcttttaaagaataagataaaactgtcatacaaccagctgtctatgcttaaaagcaactcgcagatttcattgaaggagcttcatgctatatgctatcttttatatggtcggcttcccaaaaaaattaaacaagggatgcgactgtgtaaaacaatggcgggactatgtggtgaacttttatgtgcatttttagctccgtaaatgataatatgtatttaaaacaaacagatattaccaaaatatattctatgtacataatatctgggaaattatttttttttctcatacccttaaatataaaaatattgggtttcttcactaaactttagaggtaaaaatttttctttgttttgcaccatcatgtatgggtttaggctgtcccagggattgtttatttgaatatttcctaaataggaacacaacgccatgatcatatatctttcattctggtaagctttttgatacatcttcaaagatgccgtacctccgagtgtgtaacagcaaacaaacgtccgtacttttccatgggtcgcagcccattccattccgtagctcagcatcttttgctgtatttttttattcgctttataaaaaaagtttttcatccattccacgttctcataaaaacaggcacttaaaaagagcactaggggtagtgtagtcttattatagaatgtaggaatgtatgttttagttatttttttcaacgcgtgttccatactatgttttaccgccataaaaatacaaaaccaataccaactttttctataaaaggttttgctgtacacatataaacgagcaaaatatatttcaaactctatattctttttataaaaaaactcgagacagtcgtttatgttacgactttttctaaatacctcaaaaacagtaattaattcactgtcgctgtggaaatgttcgtaagctaactgtttaatgtctttaggggtcaattctttttttgggagcagtggtttgagattcggcaaaggtcgtctaaagtagtgagcgaacttttcattcgctccccaacacaaaagccgataagccagcatgtagttatcacgttttaccgcgtaaataagcaaatagtttatattgatacatgtaccatgttgctgcccgtttggacatatgttgccgcattctgaacacttatgaatgagatcatagttcttacaacataaccccaaacgggttagtacttctttgtcacgttttaaaaactcgacatgattctttaatgttaatgctttgagcgcaatgttaaataaactctgcattttattaaaatgaggttagtatcatgttttagtataaaatttagcggctgtttacataatgctaaataaacttaacgttcctactaaaccaaaaaaaatcaaattgactaagtcatagagaatttgacgatgttggtaggtaattttttaacatggtatatatttttttagggtcggttatattaggtaataaaagaggacgtgccgttaaagtattttgcttaagatcctttagatccttacaaaaatatagattgttcgtctgatgatgccactgtgttgcagtgatggcttgatcaatatcacctcccaagacaaaacagtagtatatcgttaaaaagttgtaatctttcatacaagccaactgcatcattttatcgatgtccatatgaacgatcttttgctcgtatatttcatgaaggtcaaatacattgttgaagtaaatggcgcacatgagtcgccacatactaaggtgcccatatgtttgatagaaaaaggagatagctcttttaagcttatattttactgctatggcatagcagtatttaacgaatacgttcatgggtacattatctaagatataaaatatgaaaaactttaactctcgatgaatctcttcccccatttcctgtacatttagagcttccaacataggatttttatcaaatatttcatgacataaaataatgttattgctcgttttatgacgcattaaaccggtgaaaatttccttattatttaaactatctttagctcctaactttcgacacagctcctgagtttgttccgtcctagcacaggtcagcccataataaatgtttgctccccactcggtgaacagccttattacgtcatagttattttcttttatggccatgattaatgccacatcaagatgaagaagttcccccttaaagggggttgagcttaaaataacgtaattacagtagtgacataagctaatgggcttgttttgccaccataagccacaatattttaaaatataatgatactcctcaggcacgctctgtttggccacagcctttttggccagggtttgcaaggagagcatgataacttcttgaaaaaaaaactcaaattaagttcctacttttttaaaatattagtatggacagatctaccatcatatgaaggaattctttcatcgttaaacactgaagagataatactttcatcgtatagagaatatcatgtcaatccatatattgaatgttatatatcattaaacccatcattaatatagtgtttatgtgctatggacaggttttttgaatgataatcttttaacatacgttttataacttcgggatcagtttcttttaaagataaagaatcattcatgttataacaatttaatgataacatgctggcaatgaacgagttgtctttttgatgcgctagagtctttccctcctcaaaggcattggcgcctaagtctatacaaaagaatatgtttccgatattatagaactgaatagaatgaaacatggcctgattgatatcagcccctaagacgacgcaacagtaataaatcgttaaatagttatagttcttgcgacaggcccactttagcatttcattcatgtctatgcgaatcctctccttttcgtacacttcgtgaagttcaaacacattattgtaaaaaagggcgcacataagccgccaccgatgtagatgagcatatctctgataaaaatagcaaatcgcctccttaaggttacattctattgccatcgcgtaccaatatttagtaaacatctcgcttaatatatcggtttctaccattaatccctccagttgttcataaatcattccctttacttcaaaacgatttatggtatctaaaatgggattattagaaaatacctcatggcagaaaatgatgttactgctagttagatcacgtttcaatgtgtaaaaaaatcgtaaaatttcctggtcatttaactgttctttggcacctagctgcctgcacaggtctcgggtgtgctccgtgttgacagaaagcaaaccgtagttgatgtttgcaccccactcggtgaacaattctattagatcgtgattgttttcctccacagctttcaccaaggccgcgttaagatttgtgccgttcttaaaatacggcgtccatattttcttttgatgatacatgatagggccattatgccaccatagaccgcagcacttcaaaaaatgaggatggcatttggccggatactggctggccagcacctttttggtgagagtctgcagagagaggaccatatttcttttttttgaaaaaatcaaattaaaaaaatcatgcttgtttagcatacatgtaatattgttataattacgttataattacgttataattacgttataactatattataacaatggtataacaatggtataacaatgttataacaatgttataacgatgtatcattgatgtcatcattcaactaggccaacatactttttaatttatagttttttaatagatgatatattttgttaggatctgcttcttttaacgttaatagcgaggagtctgcactataaatgtctaatgataaatgatgagatatcaaatagtaattccgttgctctgctagggcctttgcctcttcaaaggcgtcggctcccagatctatacaaaagaacaagttatccatattataaaatcgtacgcaggcaagcatagctgaattaatattagctcctaagagaaaacaataatatatggttaaaaaattgttatcttttgtgcaggccatccgcatcatttcatccacgtccatgcggatcttttccttttcatacaaattatgtaggtcaaacagcttattaaaacaaagagcacagattaaccaccacgtatttagatacttaaaatgttggtaaacataagaaatggcctccctaagattatcctgcaatgccactataaaacagtatatcgttaacatatcaccatccgacatattacttaatatgtcggtgtcttctactaaccttttcaacttccaatatatggatgaccttatttcccttataatgacataggctggaaagggattatcattaaaaagtttaagacataagataatattactgctagtagtgccagggtgtattaatttaaagaacatgtgcataatcttctttttatccacgcggtacttggctcctaattcccagcaaaattctcgaacaggcggcgtattggcgcaaattaacccatagttgatgtctgcgccccattctgtaaacagttttattaactgatagttgttttcctttgtagccaacattagtgccgtattaaggtccaagccgtctgcaaagcttggcagctttatcagcatatgtttgcaatcaagggaaattggggccttataccaccatagtccgcagcgttctaagataacatggtactcaatagatacttgctgtctggctagtacctttttggcgaaggattgtaaggaaggaaacatcctgtttctttttttttaaaaatcaattatctttgttcataatcaagaaaaatccccatatttattgagtgataattttttaacatgcaatttattttttcagggtccgtaacgatcgacaacagagaaataaccggattgtaatgctttaatgataaggcatgggctatcagataattttccttttgttctgccaaagctttgccctcctcaaaggcatcggcacccaggtctatacaaaagaacaggtttccaagattatagttttgtatggaaacaagcatggcttgattgatgttggctcccatgataaaacagtagtaaatggccgaatagctataatcttggatgcaggctatgtgcatcatttcatcaatatccatgcggaccctttctatttcgtacagctcgtgaaggtcgaacacgttgttgtaaaaaagggcgcacatgagccgccacctatgtagacgcgggtatttctggtaaaagtagcggatagcatctttgaggtcatagtccaccgctatcgcgtaccagtatttggttaaaacagtgctaaagctatcatcatggtccagcatgaaggttatctccatgagccctcttaactcccacatgatttcccccctcagatccagattatctataatccttaaattggggttattggaaaacacctcgtggcaaaagataatattgctactggttttatcgcgcgttgtatcaaagaaaatttttaaaatatactctctttctaaatattctttggctcccagctctttgcacagatcacgggtattttccgtgagagcacaaatcattccatagttaatatctgcaccccattcagtaaacagctttatcaagtcatgattattctccttcacggctttcatcagtcctatgtttaactcgataccttgactaaaacaggttgaccttataaataatttattgcgtcgaatatgaagcataatggggccattatgccaccacaggccacaacacttcaggacatgatattgatctaccggtatacactgcccggccagtactttcttcgtgagggattgcagggaaggcaacatgcctttccatcctttgacggaaatcaaattatctactaataactatcagtgtttatattaagtatttagatattatcccgggctggatacgtagtatcgctattcacatgtacttccaactctagccggagcctgcagggtcatttatttttaatattgattcttttttgtatttaatcatttagagaaggtcatcataggagccagatgttctctctccagaacttatgtcgaaaaacattacctaaccgtaaacttcctgaattttttgacgaatatatattacaactgctgggattatactgggaaaaccatggaactattcaacgagcaggaaacaactgtgtgcttatacagcaacataccctcattcccgtaaatgaagccctgagaacagcagcatctgaagaaaattatgagatcgtgagccttttattagcgtgggaggggaacctttactatgctattataggggctctagagggcaaccgccacgacttaattcgtaaatatgatgaccaaatcaaggaccatcatgaaattctgccattcattgacgatccagtcatatttcacaaatgccatatcatgcggcaatgcttttttgattgtattttatatcaagctgtaaaatatagtaagtttcgcgttcttctttactttaaacatagattagaggatgatttgcccttcactcatttacttattgaaaaggcatgtaaagatcataattatgaagttattaaatggatatatgaaaacctacatatctacaatatgatagatacctttgaatgtgctattgcccataaggatctacatctatattgtttggggtatagatttatatataacagaatcgtacccgataagtatcatcatttagatattcgcatgctttcaagcctacaactcctacataaggtggcagccaaaggatacttagattttatcctagaaaccttaaagtatgatcataataaagataatataaatattattctaacacaagctgcaacctataaccatagaaaaattttaatctatttcattcctcaatcaacccacgcacagatagaacaatgtttactagtggcgataaaagcaaaatcttccaggaaaaccttgaacttactactgtctcacctaaacctttccatcaacctcatcaaaaaaataagccattatgttgccacttacaattcaacaaatataataggcattctgagtatgcggcggaaaaagaagatatatttagatatcatattgacaaaatttgtaaaaaaagctatttttaataagtttgtcgttcgatgtatggatacattttctataaacccggaaagaatccttaaaatagccgcgcgaataaataggatgatgttagtgaaaaaaatatctgaacatgtttggaaaaatcatgcggttagacttaaataccttaaacatgcggtacacacgatgaagcataaagatgggaaaaatagactcatgaactttatctatgatcgctgttattaccatatgcaaggggaagaaatctttagcctcgcaagattttatgcaatccatcatgcaccaaagttgtttgacgttttttatgattgttgtatcctagatacgatacgattcaaaagccttcttttagattgttcacatatcataggtaaaaacgctcatgatgctaccaatatcaacatcgtgaacaagtatatcggcaacctgtttgttatgggagttcttagcaaaaaagaaatcttacaggactatccatccatttattctaaacaatacatgccttagtttattttttttgcggccgaaacattattcttaccctagaaaacgcttatagtcatcttaaatcataggtaaggaagatcatcatattttttgaaacgtaattttttaacgcatgatctatgatttcagggtccgtgcttttaggcaacggggtggtggccggactataaatctttagggataaaatgttctttataagctcatacccttcccctaaagctgtagtaccctcttcgaaaacatcagcccccagatctatacaaaagaacatgttttctatattatagtactgtattgagctaagcatggcttgattgatgttggcgcccaggacatagcagtagtacatggttgaaaggttgtggtctttgatgcaggcgatccgcatcatctcttctatgtccatatggatcttgtccttttcatacgcctcatgaaggtcaaacacattattaaaacaaagagcacatgttaaccgccacgtattcaggtgtgtatatttttggtaaaaatactgtatggcctctttcaggttatagcgtatggctatagcgtaccagtatttgagtagtaatgtactgagcgaaaactcattatttagcagatcggtttttactattaactcccttaactcccagaaaatttctatcctcatttttatattatttactttttgtaatatcggattgttggaaaacacctcatggcataaaataatgttactactagttttatgaaactttagatctataaaaatttgtaaaatttcttcttcattcaaggtttccttggcacctagctctcgacagaggtcccaggtgtgctccgtgttgacagataccagcccgtagttgatgtccgccccccactctgcaaacagttttataaggttgtagttgttttcccttacagccttcactaacgccgtatttaggtttaagccctctttaatacctgctgattttatgagccttaggttatgatcaaacgtgatcggagcatcatgccaccataggtcataacactttaaaagataatgttggttcgtgggcacgcattgtccagccaacacctttttggtcagagattgcagggaaggcaacatgtctcttcatcttttaaaaaaaaatcaaattaattagccgaataaatttttctttcgagggctttttaaaagagctctttaagagctctttaagagctttttaagagattaaaaaattattcttgctggcattctgccaagtatgcggcattcctatcatctatagtatattatgagaatattcccaaatgatggataagttttttgatttataatcttttaataaactgcttatttcttcggggtcctttaagtttagtggcaaggaagcatctgagctgtaaatatccaaagccaaactatggctcagaaaattataacctttttgttccgctatggcacgaccctcttcaaaggcattaccacccaaatctatacagaaaaatatattaccgatgttataatattgtactgaagtaagcatagcttggttgatgttgccccccagcgcgtaacagtaatatattgttaatggattgttatccttggtagaagccagacatatcatgtcatggacgtctatttggatgttttccttgtggtacatctcatgaagctcatatattttgttataatacaggagacattttaatcgccattcattaagatccgtatatttctcatctagaaaacaaatggcgtccttacaatcgtattgtactgctttggcgtaccaatacttcactagtaaaccatttaactcgtccgtttcttttatttctatgagcccccatagtcttttataaattaagccccttaattgtataacaaatttgttttctaaaataggattattcataaaaatttcatggcacaaaataatactgccgctggttttattgtgcattatcctggtaaaaatacggaaaatatcgttgtcctctagagtttctttggcgcctagctgtctacacaactctcggatgtgcttcgtattgatagaaagcaaaccatagttgatatttgcgccccactctgtaaagagctttatcagactatagttgttttccttaacagctattattaatgccacacgaaggtctatatcttctcctaaaaatcctgattttatttgtattcggccacgatccatacaaagcttgagaggagcatcatgccaccataggccacaatatttcaaaatgcagtgttcatctattgacaaacactggctggctatcgtctttttgacgagggtctgcagagagagcggcaacgacatgtttctttttcaccaaaaaaaatcaaatgttctcgtctttaaaggttaattcatgttcttaaaatgttcatttcatgatagtgattaataatatggtttaataacgctagaaggcttgtttataagacagtcataagcagtctataagacagtctataagcagtctataagacagtctatgacttagtctataactataatttctggatgggctgtaagatactcttcggctcgtttcagattttttgaagtatatgtctttagcatatcatatatttcctggggttcggttacatctaataccaaggtcacatcacggctgaaaagctgctttactaagaaaatgttgctcaagttatacatataagctttgtgcgcaatgagttgtgccctatcaaaatcggcagcccccaaatcaatacagaaaaacatgtttaaagtattattgttatagatagaaagattcatgccataatcgagactagcccccaacctatgacagtaataaatggccgcgtaatttttttcccgcaagcaagcaaatttcatcatcagattagggctgatgcaaatctctttttcacgacacaactcgtgtatgtcaaaaatgttattaaaataaaggctacaagctacccgccaatagaggtgatttttatgccttttatagaaatagtgaatagcctttgtaaaattatgtcgtaatgccagggcaaaccaaaactttgttaataggtggtgcgccgtatcccccgtcaacggaatgtttgaacaggtgtacgtaactgtgtctaaagtggttctagttacggtttccaagagtggattatgacaaaacatgtcataacccagcagaactcctgcacaggattttagcctggccacttcttttaaaatttccagaagacggggttcggatacaggcgttaagcctcccagttccgcacacagccgctttagatacacggcaggaacacgtataagcccatattcaggatttgcgccccaatccacaaataaacgtataagttcaagattatcgctcttcacggcctttactagcgccgcttcgagacaaagatcatcctcagaaaaacactgtaaatgttta

SEQ ID NO: 424 - protein, 254 aa, Artificial Sequence
  SYNTHETIC CONSTRUCT DERIVED FROM HUMAN THOUGHT
  MISC_FEATURE (1)..(254): X1-X7 ARE D OR N
  MISC_FEATURE (1)..(254): AT LEAST ONE OF X1-X7 IS D
MVNSCTFLHIFLCCSFLYSFCCAVVAGSXTTYCFWFPLVRGXFSFELTVXYTVCPPCLTRQAATEIYEPGRSLWCRIGYDRCGEDDHDELGFMIPPGLSSEGHLTSVYAWLAFLSFSYTAQFHPEIFGIGXVSRVYVDIKHQLICAEHDGQXTTLPRHDXISAVFQTYYQHQVDGGNWFHLEWLRPFFSSWLVLXVSWFLRRSPANHVSVRVLQILRPTPPQRQALLSSKTSVALGIATRPLRRFAKSLSAVRR

SEQ ID NO: 425 - protein, 203 aa, Artificial Sequence
  SYNTHETIC CONSTRUCT DERIVED FROM HUMAN THOUGHT
ATVYDIGHDAVMYVAERKVSWAPRGGDEVKFEAVPGELKLIANRLRTSFPPHHTVDMSKFAFTAPGCGVSMRVERQHGCLPADTVPEGNCWWSLFDLLPLEVQNKEIRHANQFGYQTKHGVSGKYLQRRLQVNGLRAVTDLNGPIVVQYFSVKESWIRHLKLAGEPSYSGFEDLLRIRVEPDTSPLADKEEKIFRFGSHKWYG

SEQ ID NO: 426 - protein, 470 aa, Artificial Sequence
  SYNTHETIC CONSTRUCT DERIVED FROM HUMAN THOUGHT
  MISC_FEATURE (1)..(470): X1-X3 ARE D OR N
  MISC_FEATURE (1)..(470): AT LEAST ONE OF X1-X3 IS D
SLCQVIEDCCCSQXKTNRVTPEEVAAKIDLYLRGATNLEECLARLEKARPPRVIDTSFDWDVVLPGVEAATQTIKLPQVNQCRALVPVVTQKSLDXNSVPLTAFSLANYYYRAQGDEVRHRERLTAVLSKLEKVVREEYGLMPTEPGPRPTLPRGLDELKDQMEEDLLKLANAQTTSDMMAWAVEQVDLKTWVKNYPRWTPPPPPPKVQPRKTKPVKSLPERKPVPAPRRKVGSDCGSPVSLGGDVPNSWEDLAVSSPFDLPTPPEPATPSSELVIVSSPQCIFRPATPLSEPAPIPAPRGTVSRPVTPLSEPIPVPAPRRKFQQVKRLSSAAAIPPYQDEPLDLSASSQTEYEASPPAPPQSGGVLGVEGHEAEETLSEISDMSGNIKPASVSSSSSLSSVRITRPKYSAQAIIDSGGPCSGHLQEVKETCLSVMREACDATKLDDPATQEWLSRMWDRVDMLTWRXTS

SEQ ID NO: 427 - protein, 111 aa, Artificial Sequence
  SYNTHETIC CONSTRUCT DERIVED FROM HUMAN THOUGHT
NGPNAWGDEDRLNKKKRRRMEALGIYVMGGKKYQKFWDKNSGDVFYEEVHDNTDEWECLRVGDPADFDPEKGTLCGHVTIENKAYHVYTSPSGKKFLVPVNPENGRVQWEA

SEQ ID NO: 428 - protein, 553 aa, Artificial Sequence
  SYNTHETIC CONSTRUCT DERIVED FROM HUMAN THOUGHT
  MISC_FEATURE (1)..(553): X1-X3 ARE D OR N
  MISC_FEATURE (1)..(553): AT LEAST ONE OF X1-X3 IS D
XRTFTLGPVNLKVASEVELKDAVEHNQHPVARPIDGGVVLLRSAVPSLIDVLISGADASPKLLAHHGPGNTGIDGTLWDFESEATKEEVALSAQIIQACDIRRGDAPEIGLPYKLYPVRGNPERVKGVLQNTRFGDIPYKTPSDTGSPVHAAACLTPXATPVTDGRSVLATTMPPGFELYVPTIPASVLDYLDSRPDCPKQLTEHGCEDAALKDLSKYDLSTQGFVLPGVLRLVRKYLFAHVGKCPPVHRPSTYPAKNSMAGINGNRFPTKDIQSVPEIDVLCAQAVRENWQTVTPCTLKKQYCGKKKTRTILGTNNFIALAHRAVLSGVTQGFMKKAFNSPIALGKNKFKELQTPVLGRCLEADLASCDRSTPAIVRWFAANLLYELACAEEHLPSYVLNCCHDLLVTQSGAVTKRGGLSSGDPITSVSNTIYSLVIYAQHMVLSYFKSGHPHGLLFLQDQLKFEDMLKVQPLIVYSDDLVLYAESPTMPNYHWWVEHLNLMLGFQTDPKKTAITDSPSFLGCRIINGRQLVPNRDRILAALAYHMKASXVS

SEQ ID NO: 429 - protein, 441 aa, Artificial Sequence
  SYNTHETIC CONSTRUCT BASED ON HUMAN THOUGHT
GKKSRVCGYCGAPAPYATACGLDVCIYHTHFHQHCPVTIWCGHPAGSGSCSECKSPVGKGTSPLDEVLEQVPYKPPRTVIMHVEQGLTPLDPGRYQTRRGLVSVRRGIRGNEVGLPDGDYASTALLPTCKEINMVAVASNVLRSRFIIGPPGAGKTYWLLQQVQDGDVIYTPTHQTMLDMIRALGTCRFNVPAGTTLQFPVPSRTGPWVRILAGGWCPGKNSFLDEAAYCNHLDVLRLLSKTTLTCLGDFKQLHPVGFDSHCYVFDIMPQTQLKTIWRFGQNICDAIQPDYRDKLMSMVDTTRVTYVEKPVRYGQVLTPYHRDREDDAITIDSSQGATFDVVTLHLPTKDSLNRQRALVAITRARHAIFVYDPHRQLQGLFDLPAKGTPVNLAVHCDGQLIVLDRNNKECTVAQALGNGDKFRATDKRVVDSLRAICADLE

SEQ ID NO: 430 - protein, 153 aa, Artificial Sequence
  SYNTHETIC CONSTRUCT DERIVED FROM HUMAN THOUGHT
GRYFTWYQLASYASYIRVPVDSTVYLDPCMGPALCNRRVVGSTHWGADLAVTPYDYGAKIILSSAYHGEMPPGYKILACAEFSLDDPVKYKHTWGFESDTAYLYEFTGNGEDWEDYNDAFRARQEGKIYKATATSLKFYFPPGPVIEPTLGLN

SEQ ID NO: 431 - protein, 2040 aa, Artificial Sequence
  SYNTHETIC CONSTRUCT DERIVED FROM HUMAN THOUGHT
  MISC_FEATURE (1)..(2040): X1-X6 ARE D OR N
  MISC_FEATURE (1)..(2040): AT LEAST ONE OF X1-X6 IS D
XTSPLADKEEKIFRFGSHKWYGAGKRARKARSCATATVAGRALSVRETRQAKEHEVAGANKAEHLKHYSPPAEGNCGWHCISAIANRMVNSKFETTLPERVRPPDDWATDEDLVNAIQILRLPAALDRNGACTSAKYVLKLEGEHWTVTVTPGMSPSLLPLECVQGCCGHKGGLGSPDAVEVSGFDPACLDRLAEVMHLPSSAIPAALAEMSGDSDRSASPVTTVWTVSQFFARHSGGNHPDQVRLGKIISLCQVIEDCCCSQXKTNRVTPEEVAAKIDLYLRGATNLEECLARLEKARPPRVIDTSFDWDVVLPGVEAATQTIKLPQVNQCRALVPVVTQKSLDXNSVPLTAFSLANYYYRAQGDEVRHRERLTAVLSKLEKVVREEYGLMPTEPGPRPTLPRGLDELKDQMEEDLLKLANAQTTSDMMAWAVEQVDLKTWVKNYPRWTPPPPPPKVQPRKTKPVKSLPERKPVPAPRRKVGSDCGSPVSLGGDVPNSWEDLAVSSPFDLPTPPEPATPSSELVIVSSPQCIFRPATPLSEPAPIPAPRGTVSRPVTPLSEPIPVPAPRRKFQQVKRLSSAAAIPPYQDEPLDLSASSQTEYEASPPAPPQSGGVLGVEGHEAEETLSEISDMSGNIKPASVSSSSSLSSVRITRPKYSAQAIIDSGGPCSGHLQEVKETCLSVMREACDATKLDDPATQEWLSRMWDRVDMLTWRXTSVYQAICTLDGRLKFLPKMILETPPPYPCEFVMMPHTPAPSVGAESDLTIGSVATEDVPRILEKIENVGEMANQGPLAFSEDKPVDDQLVNDPRISSRRPDESTSAPSAGTGGAGSFTDLPPSDGADADGGGPFRTVKRKAERLFDQLSRQVFDLVSHLPVFFSRLFYPGGGYSPGDWGFAAFTLLCLFLCYSYPAFGIAPLLGVFSGSSRRVRMGVFGCWLAFAVGLFKPVSDPVGAACEFDSPECRNILHSFELLKPWDPVRSLVVGPVGLGLAILGRLLGGARCIWHFLLRLGIVADCILAGAYVLSQGRCKKCWGSCIRTAPNEVAFNVFPFTRATRSSLIDLCDRFCAPKGMDPIFLATGWRGCWAGRSPIEQPSEKPIAFAQLDEKKITARTVVAQPYDPNQAVKCLRVLQAGGAMVAKAVPKVVKVSAVPFRAPFFPTGVKVDPDCRVVVDPDTFTAALRSGYSTTNLVLGVGDFAQLNGLKIRQISKPSGGGPHLMAALHVACSMALHMLAGIYVTAVGSCGTGTNDPWCANPFAVPGYGPGSLCTSRLCISQHGLTLPLTALVAGFGIQEIALVVLIFVSIGGMAHRLSCKADMLCVLLAIASYVWVPLTWLLCVFPCWLRCFSLHPLTILWLVFFLISVNMPSGILAMVLLVSLWLLGRYTNVAGLVTPYDIHHYTSGPRGVAALAIAPDGTYLAAVRRAALTGRTMLFTPSQLGSLLEGAFRTRKPSLNTVNVIGSSMGSGGVFTIDGKVKCVTAAHVLTGNSARVSGVGFNQMLDFDVKGDFAIADCPNWQGAAPKTQFCTDGWTGRAYWLTSSGVEPGVIGKGFAFCFTACGDSGSPVITEAGELVGVHTGSNKQGGGIVTRPSGQFCNVAPIKLSELSEFFAGPKVPLGDVKVGSHIIKDISEVPSDLCALLAAKPELEGGLSTVQLLCVFFLLWRMMGHAWTPLVAVSFFILNEVLPAVLVRSVFSFGMFVLSWLTPWSAQVLMIRLLTAALNRNRWSLAFFSLGAVTGFVADLAATQGHPLQAVMXLSTYAFLPRMMVVTSPVPVITCGVVHLLAIILYLFKYRGPHHILVGDGVFSAAFFLRYFAEGKLREGVSQSCGMNHESLTGALAMRLNDEDLDFLMKWTNFKCFVSASNMRNAAGQFIEAAYAKALRVELAQLVQVDKVRGTLAKLEAFADTVAPQLSPGDIVVALGHTPVGSIFDLKVGSTKHTLQAIETRVLAGSKMTVARVVDPTPTPPPAPVPIPLPPKVLENGPNAWGDEDRLNKKKRRRMEALGIYVMGGKKYQKFWDKNSGDVFYEEVHXNT

SEQ ID NO: 432 - protein, 1295 aa, Artificial Sequence
  SYNTHETIC CONSTRUCT DERIVED FROM HUMAN THOUGHT
  MISC_FEATURE (1)..(1295): X1-X4 ARE D OR N
  MISC_FEATURE (1)..(1295): AT LEAST ONE OF X1-X4 IS D
XRTFTLGPVNLKVASEVELKDAVEHNQHPVARPIDGGVVLLRSAVPSLIDVLISGADASPKLLAHHGPGNTGIDGTLWDFESEATKEEVALSAQIIQACDIRRGDAPEIGLPYKLYPVRGNPERVKGVLQNTRFGDIPYKTPSDTGSPVHAAACLTPTDGRSVLATTMPPGFELYVPTIPASVLDYLDSRPDCPKQLTEHGCEDAALKDLSKYDLSTQGFVLPGVLRLVRKYLFAHVGKCPPVHRPSTYPAKNSMAGINGNRFPTKDIQSVPEIDVLCAQAVRENWQTVTPCTLKKQYCGKKKTRTILGTNNFIALAHRAVLSGVTQGFMKKAFNSPIALGKNKFKELQTPVLGRCLEADLASCDRSTPAIVRWFAANLLYELACAEEHLPSYVLNCCHDLLVTQSGAVTKRGGLSSGDPITSVSNTIYSLVIYAQHMVLSYFKSGHPHGLLFLQDQLKFEDMLKVQPLIVYSDDLVLYAESPTMPNYHWWVEHLNLMLGFQTDPKKTAITDSPSFLGCRIINGRQLVPNRDRILAALAYHMKASXVSEYYASAAAILMDSCACLEYDPEWFEELVVGIAQCARKDGYSFPGTPFFMSMWEKLRSNYEGKKSRVCGYCGAPAPYATACGLDVCIYHTHFHQHCPVTIWCGHPAGSGSCSECKSPVGKGTSPLDEVLEQVPYKPPRTVIMHVEQGLTPLDPGRYQTRRGLVSVRRGIRGNEVELPDGDYASTALLPTCKEINMVAVASNVLRSRFIIGPPGAGKTYWLLQQVQDGDVIYTPTHQTMLDMIRALGTCRFNVPAGTTLQFPVPSRTGPWVRILAGGWCPGKNSFLDEAAYCNHLDVLRLLSKTTLTCLGDFKQLHPVGFDSHCYVFDIMPQTQLKTIWRFGQNICDAIQPDYRDKLMSMVXTTRVTYVEKPVRYGQVLTPYHRDREDDAITIDSSQGATFDVVTLHLPTKDSLNRQRALVAITRARHAIFVYDPHRQLQGLFDLPAKGTPVNLAVHRDGQLIVLDRNNKECTVAQALGNGDKFRATDKRVVDSLRAICADLEGSSSPLPKVAHNLGFYFSPDLTQFAKLPVELAPHWPVVTTQNNEKWPDRLVASLRPIHKYSRACIGAGYMVGPSVFLGTPGVVSYYLTKFVKGEAQVLPETVFSTGRIEVDCREYLDDREREVAASLPHAFIGDVKGTTVGGCHHVTSRYLPRVLPKESVAVVGVSSPGKAAKALCTLTDVYLPDLEAYLHPETQSKCWKMMLDFKEVRLMVWKDKTAYFQLEGRYFTWYQLASYASYIRVPVXST

SEQ ID NO: 433 - protein, 116 aa, Artificial Sequence
  SYNTHETIC CONSTRUCT DERIVED FROM HUMAN THOUGHT
  MISC_FEATURE (1)..(116): X1 AND X2 ARE D OR N
  MISC_FEATURE (1)..(116): AT LEAST ONE OF X1 AND X2 IS D
SLDVVAHFQHLAAIEAETCKYLASRLPMLHNLRMTGSXVTIVYXSTLNQVFAIFPTPGSRPKLHDFQQWLIAVHSSIFSSVAASCTLFVVLWLRVPILRTVFGFRWLGAIFLSNSQ

SEQ ID NO: 434 - protein, 254 aa, Artificial Sequence; identical to SEQ ID NO: 424
  SYNTHETIC CONSTRUCT DERIVED FROM HUMAN THOUGHT
  MISC_FEATURE: AT LEAST ONE OF X1-X7 IS D
  MISC_FEATURE (1)..(254): X1-X7 ARE D OR N
  MISC_FEATURE (1)..(254): AT LEAST ONE OF X1-X7 IS D

SEQ ID NO: 435 - protein, 178 aa, Artificial Sequence
  SYNTHETIC CONSTRUCT DERIVED FROM HUMAN THOUGHT
  MISC_FEATURE (1)..(178): X1-X4 ARE D OR N
  MISC_FEATURE (1)..(178): AT LEAST ONE OF X1-X4 IS D
MASSLLFLVVGFKCLLVSQAFACKPCFSSSLADIKTXTTAAASFAVLQDISCLRHRDSASEAIRKIPQCRTAIGTPVYVTITAXVTDENYLHSSDLLMLSSCLFYASEMSEKGFKVVFGXVSGIVAVCVXFTSYVQHVKEFTQRSLVVDHVRLLHFMTPETMRWATVLACLFAILLAI

SEQ ID NO: 436 - protein, 70 aa, Artificial Sequence
  SYNTHETIC CONSTRUCT DERIVED FROM HUMAN THOUGHT
  MISC_FEATURE (1)..(70): X1-X4 ARE D OR N
  MISC_FEATURE (1)..(70): AT LEAST ONE OF X1-X4 IS D
MLEKCLTAGCCSRLLSLWCIVPFCFAVLAXASXDSSSHLQLIYXLTLCELXGTDWLANKFDWAVESFVIF

SEQ ID NO: 437 - protein, 174 aa, Artificial Sequence
  SYNTHETIC CONSTRUCT DERIVED FROM HUMAN THOUGHT
MGSSLDDFCHDSTAPQKVLLAFSITYTPVMIYALKVSRGRLLGLLHLLIFLNCAFTFGYMTFAHFQSTNKVALTMGAVVALLWGVYSAIETWKFITSRCRLCLLGRKYILAPAHHVESAAGFHPIAANDNHAFVVRRPGSTTVDGTLVPGLKSLVLGGRKAVKQGVVNLVKYAK

SEQ ID NO: 438 - protein, 123 aa, Artificial Sequence
  SYNTHETIC CONSTRUCT DERIVED FROM HUMAN THOUGHT
MPNNNGKQQKRKKGDGQPVNQLCQMLGKIIAQQDQSRGKGPGKKNKKKNPEKPHFPLATEDDVRHHFTPSERQLCLSSIQTAFNQGAGTCTLSDSGRISYTVEFSLPTHHTVRLIRVTASPSA

SEQ ID NO: 439 - protein, 296 aa, Artificial Sequence
  SYNTHETIC CONSTRUCT DERIVED FROM HUMAN THOUGHT
VRRESPKHRWCFTINDWTPTEWESIVECGGSIARYLIIGKEVGKSGTPHLQGYVNFKNKRRLSSVKRLPGFGRAHLEPARGSHKEASEYCKKEGDYLEIGEDSSSGTRSDLQAAARILTETSGNLTEVAEKMPAVFIRYGRGLRDFCGVMGLGKPRDFKTEVYVFIGPPGCGKTREACADAAARELQLYFKPRGPWWDGYNGEGAVILDDFYGWVPFDELLRIGDRYPLRVPVKGGFVNFVAKVLYITSNVVPEEWYSSENIRGKLEALFRRFTKVVFWGEGGVKKDMETVYPINY

SEQ ID NO: 440 - protein, 296 aa, Artificial Sequence
  SYNTHETIC CONSTRUCT DERIVED FROM HUMAN THOUGHT
VRRESPKHRWCFTINNWTPTEWESIVECGGSIARYLIIGKEVGKSGTPHLQGYVNFKNKRRLSSVKRLPGFGRAHLEPARGSHKEASEYCKKEGDYLEIGEDSSSGTRSDLQAAARILTETSGDLTEVAEKMPAVFIRYGRGLRDFCGVMGLGKPRDFKTEVYVFIGPPGCGKTREACADAAARELQLYFKPRGPWWDGYNGEGAVILDDFYGWVPFDELLRIGDRYPLRVPVKGGFVNFVAKVLYITSNVVPEEWYSSENIRGKLEALFRRFTKVVFWGEGGVKKDMETVYPINY

SEQ ID NO: 441 - protein, 296 aa, Artificial Sequence; identical to SEQ ID NO: 440
  SYNTHETIC CONSTRUCT DERIVED FROM HUMAN THOUGHT

SEQ ID NO: 442 - protein, 245 aa, Artificial Sequence
  SYNTHETIC CONSTRUCT DERIVED FROM HUMAN THOUGHT
MFKWLMSSLCGIRDSTSPEVYEPIIGGQNPATMLRLQSALAAVNALLPATLTIEDVISSADNTRRLVKAQTLARTYQACQHNIECLSRHRASSDNPNLNAVVTTHMINAKRLSDTCLAALMHLYLSVGAVDATTDTMVDHAIRMTAENSVVMADVAVLEKTLGLDPQATVRAQDLLALNSGVLNSVNAVAEMTDPTDDVEFTQSVHSPLLPRQLSTTEVVGVPSPVKSNLKSKHKPKRKASLVAV

SEQ ID NO: 443 - protein, 497 aa, Artificial Sequence
  SYNTHETIC CONSTRUCT DERIVED FROM HUMAN THOUGHT
MGLFGLLKYAYSNRLVKHDAITTPPGIMTPIAIDLWNVMYTLMEKFDQERNFPLDGAAVTARCFFSLLRLLLKRSYYPIFVSDRGIYGDGRVKQGAKAIVSQTMSSYGGSGRLSSACFTGDEHDTEFQEDPEENDVSVPPQDTCPPTEISAGYVEPERKCEHSSTRWSALDGAPRLSYRLCVNLIRHLGYPYVNACNLEADDVCANLYHTNTVAQIYTTDTDLILMGCDIILDIMPLFPPTLRCCDVLMDLGVTYDEFLTEFVRCHTDLHEPQTLASVQSVISSLHSPPDEDEGADMPQTPSGHSWRCPNERRVISWRRQDDHDYDSSTEDSDQSDSSEEEEECPAGKGFGYRENPAVETCKRRTRPRRSAEASGRILHLKYTSRYPPIMESAPRALVRMAPPKTRHEVLERKFVKHVVSMLTPERRGSLSIMRRLPITQEPSDFSLVHDTLKNLVSEHEIARELANMFWNHIPTPTDYNTVLVNYWDDCGHRRQWS

SEQ ID NO: 444 - protein, 275 aa, Artificial Sequence
  SYNTHETIC CONSTRUCT DERIVED FROM HUMAN THOUGHT
MDSYNYRDFAVGGGLLQRIRLVVSGSLHCGESDATLNDPKHLPARCVFQFSGPDDNSVTFPIEYVLRLMKNWARSQCDPYIRIQNTGVSVLFQGFFFAPPNAPMASITSEHNNVILKSTHTTGLALSGIERVKRGGGLDLRPLQAMMQISCFTRMPVVQLSFRFMGPEDASRTQRLLERATSFGAMELHQKRTVDSCDRSNGIVSPREHRECRERQKRRPTPKRCASEVFASLASISSAFASERVKRRPVRIAAAILAFVFVAVILAIATKGRLF

SEQ ID NO: 445 - protein, 162 aa, Artificial Sequence
  SYNTHETIC CONSTRUCT DERIVED FROM HUMAN THOUGHT
MYGRSNAPGCQPPVRAHPPSSPMTSRLQLAAMEQDASDAALSGMQQARSRQASPKRLRDLIPSSDVESMSLNALDDAYGHHDFSVWFEDLMPPEMELLMPTTDAKLNYLSFTRRLASSVFHSPDNRMPGGACDHTSALDARKERFATIINKFLDLHQILHDA

SEQ ID NO: 446 - protein, 326 aa, Artificial Sequence
  SYNTHETIC CONSTRUCT DERIVED FROM HUMAN THOUGHT
MFDGRSDIYDSTSFAAELDDLYSCRSTGRENGRRSRVSTRGVHRDRCGSAAKRRSTKRRCELVARERDRYSLYLDYMASHPSDEISAVRELVVPLIKTTSITLPFDLDQTVADNCLSLSGMGYYLGIGGCCPTCTVSGEPRLHRADRAALILAYVQQLNNIYEYRGFLASVLAAAAQGDQAGVAASEGVQAERLLENVLAQPELFFAYHVLRDGGIQNVRVLFYRDLSVSGYMMYAVFPTKSVHLHYRLIDRLLAACPGYKIIAHVWQTAFVLVVRRDEGQQTDMDIPTVSAGDIYCKMCDLSFDGELLLEYKKLYAVFDDFLPPV

SEQ ID NO: 447 - protein, 272 aa, Artificial Sequence
  SYNTHETIC CONSTRUCT DERIVED FROM HUMAN THOUGHT
MKRRQRLTARSRLRAGIRCHNRFYNAMVQDLASAKRNGVYGERLAPLFSELVPAETLKTALGVSLAFEVNLGQRRPDCVCTVQFGKGSDAKGVCILIELKTCRFSKNMNTASKNLQRKGGMRQLHDSCRLLARTLPPGSGEIVLAPVLVFVAQRGMRVLRVTRLSPQVVYSNAAVLSCTISRLAEYAPPVSAKSTRRRCVAKGTKAKAFSTKAAAEPVPSITPAQPSAAAAVVSLFPAAVPADTTNAAAVHQPVAVSHVNPLAWAASLFSPK

SEQ ID NO: 448 - protein, 370 aa, Artificial Sequence
  SYNTHETIC CONSTRUCT DERIVED FROM HUMAN THOUGHT
MMAAASDSCLSLWEGSASSPNRQLTPEAVNCLTEALTEDVAVLRLIRSDPRVKIFMAVSVLTPRLARFAPPPPKLTHTAKCAVIMIYLTRPKALALQPKQFHMLVTFNKASVYSLVVRVKTKPFPVGTQRFRAVFQDPEFIGLPSDIPDPAAENIPTEINDRLDVSNFATPAQPPKDKYDCCVLAPGVWWSNANKAIYFLQMDVALLALCPAGWKARGLGIILGRLLNHQEGCATCRFTEHSDPLDATADSVATPESCLCWAPCLWRKAHQRELTVEGDRYLFRVLFMDAVERVRLTGLRRSPKITANLADLVVGIGPHGQQIPVNNAGWKLVALDADISRLIVCGCYALRYICPPTNSKHQPSSPDEYA

SEQ ID NO: 449 - protein, 450 aa, Artificial Sequence
  SYNTHETIC CONSTRUCT DERIVED FROM HUMAN THOUGHT
MARRGAAVAEEPLLPSSGIVGIGPIEGINWRTWLVQVFCFALTTSVLFITLVTASLPQTGYPCFYGSLVDYTQKDHSVVDGVWMRQIAGGVAPTLFLETTSLVAFLYYTTLVLVAISFYLIISAVLVRRYARGKECTAVAGCTRPTTTLIASHVTLVLGTLATWLLQVVILLLSHKQAVLGAAVYVVHFVSLVFFCMSFSGLGTASAQYSSNLRILKTNLPALHKMAGPGRAVMTNLGMGMLGISLPILSLMLGIILANSFHITLWQTVTVAVGVFVALGLMFLIIVELIVSHYVHVLVGPALAVLVASSTLAVATHSYFVHFHAMVSVQAPNLATASKAIVGIMAVISIIMLVVRLVRAIMFHKKRNTEFYGRVKTVSSKARRYANKVRGPRRNPQPLNVAESRGMLLAEDSETDAEEPIYDVVSEEFETEYYDDPQRVPERSHRREYR

SEQ ID NO: 450 - protein, 130 aa, Artificial Sequence
  SYNTHETIC CONSTRUCT DERIVED FROM HUMAN THOUGHT
MSSNSDNTECFGGVNYAEGMRKRKRNPVRDSTFQEYLDARNARYPRSGSTSDSDEDYTTRSKYESDVSEFKKMMDLETLPPPKAEPQAQKAEPDAAKEEPVSTTSYILNEWVAPMIGHFLAMCMYELLFK

SEQ ID NO: 451 - protein, 617 aa, Artificial Sequence
  SYNTHETIC CONSTRUCT DERIVED FROM HUMAN THOUGHT
MLDFHGISLTCAAVASSKVPARCGVTVRDSLKKALMMRGLIPECCAVYRIQDGEKKPIGWDTDISWLTGEELHVEVLENVPLTTHNFVRKTFFTLAFCDFCRKLLFQGFRCQTCGYKFHQRCSTEVPLMCVNYDQLDLLFVSKFFEHHPIPQEEASIAETALTSGSSPSAPPSDSPGPPILTSPSPSKSIPIPQPFRPADEDHRNQFGQRDRSSSAPNVHINTIEPVNIDDLIRDQGFRSDGGSTTGLSATPPASLPGSLTNVKALQKSPGPQRERKSSSSSEDRNRMKTLGRRDSSDDWEIPDGQITVGQRIGSGSFGTVYKGKWHGDVAVKMLNVTAPTPQQLQAFKNEVGVLRKTRHVNILLFMGYSTKPQLAIVTQWCEGSSLYHHLHIIETKFEMIKLIDIARQTAQGMDYLHAKSIIHRDLKSNNIFLHEDLTVKIGDFGLATEKSRWSGSHQFEQLSGSILWMAPEVIRMQDKNPYSFQSDVYAFGIVLYELMTGQLPYSNINNRDQIIFMVGRGYLSPDLSKVRSNCPKAMKRLMAECLKKKRDERPLFPQILASIELLARSLPKIHRSASEPSLNRAGFQTEDFSLYACASPKTPIQAGGYGEFAAFK

SEQ ID NO: 452 - protein, 763 aa, Canis lupus
MAALSGGGGAEQGQALFNGDMEPEAGAGAAASSAADPAIPEEVWNIKQMIKLTQEHIEALLDKFGGEHNPPSIYLEAYEEYTSKLDALQQREQQLLESLGNGTDFSVSSSASTDTVTSSSSSSLSVLPSSLSVFQNPTDISRSNPKSPQKPIVRVFLPNKQRTVVPARCGVTVRDSLKKALMMRGLIPECCAVYRIQDGEKKPIGWDTDISWLTGEELHVEVLENVPLTTHNFVRKTFFTLAFCDFCRKLLFQGFRCQTCGYKFHQRCSTEVPLMCVNYDQLDLLFVSKFFEHHPIPQEEASIAETALTSGSSPSAPPSDSPGPPILTSPSPSKSIPIPQPFRPADEDHRNQFGQRDRSSSAPNVHINTIEPVNIDDLIRDQGFRSDGGSTTGLSATPPASLPGSLTNVKALQKSPGPQRERKSSSSSEDRNRMKTLGRRDSSDDWEIPDGQITVGQRIGSGSFGTVYKGKWHGDVAVKMLNVTAPTPQQLQAFKNEVGVLRKTRHVNILLFMGYSTKPQLAIVTQWCEGSSLYHHLHIIETKFEMIKLIDIARQTAQGMDYLHAKSIIHRDLKSNNIFLHEDLTVKIGDFGLATVKSRWSGSHQFEQLSGSILWMAPEVIRMQDKNPYSFQSDVYAFGIVLYELMTGQLPYSNINNRDQIIFMVGRGYLSPDLSKVRSNCPKAMKRLMAECLKKKRDERPLFPQILASIELLARSLPKIHRSASEPSLNRAGFQTEDFSLYACASPKTPIQAGGYGEFAAFK

SEQ ID NO: 453 - protein, 749 aa, Canis lupus
QALFNGDMEPEAGAGAAASSAADPAIPEEVWNIKQMIKLTQEHIEALLDKFGGEHNPPSIYLEAYEEYTSKLDALQQREQQLLESLGNGTDFSVSSSASTDTVTSSSSSSLSVLPSSLSVFQNPTDISRSNPKSPQKPIVRVFLPNKQRTVVPARCGVTVRDSLKKALMMRGLIPECCAVYRIQDGEKKPIGWDTDISWLTGEELHVEVLENVPLTTRNFVRKTFFTLAFCDFCRKLLFQGFRCQTCGYKFHQRCSTEVPLMCVNYDQLDLLFVSKFFEHHPIPQEEASIAETALTSGSSPSAPPSDSPGPPILTSPSPSKSIPIPQPFRPADEDHRNQFGQRDRSSSAPNVHINTIEPVNIDDLIRDQGFRSDGGSTTGLSATPPASLPGSLTNVKALQKSPGPQRERKSSSSSEDRNRMKTLGRRDSSDDWEIPDGQITVGQRIGSGSFGTVYKGKWHGDVAVKMLNVTAPTPQQLQAFKNEVGVLRKTRHVNILLFMGYSTKPQLAIVTQWCEGSSLYHHLHIIETKFEMIKLIDIARQTAQGMDYLHAKSIIHRDLKSNNIFLHEDLTVKIGDFGLATVKSRWSGSHQFEQLSGSILWMAPEVIRMQDKNPYSFQSDVYAFGIVLYELMTGQLPYSNINNRDQIIFMVGRGYLSPDLSKVRSNCPKAMKRLMAECLKKKRDERPLFPQILASIELLARSLPKIHRSASEPSLNRAGFQTEDFSLYACASPKTPIQAGGYGAFPVH

SEQ ID NO: 454 - protein, 766 aa, Homo sapiens [sequence omitted]

SEQ ID NO: 455 - protein, 314 aa, Homo sapiens
MPLEQRSQHCKPEEGLEARGEALGLVGAQAPATEEQEAASSSSTLVEVTLGEVPAAESPDPPQSPQGASSLPTTMNYPLWSQSYEDSSNQEEEGPSTFPDLESEFQAALSRKVAELVHFLLLKYRAREPVTKAEMLGSVVGNWQYFFPVIFSKASSSLQLVFGIELMEVDPIGHLYIFATCLGLSYDGLLGDNQIMPKAGLLIIVLAIIAREGDCAPEEKIWEELSVLEVFEGREDSILGDPKKLLTQHFVQENYLEYRQVPGSDPACYEFLWGPRALVETSYVKVLHHMVKISGGPHISYPPLHEWVLREGEE

SEQ ID NO: 456 - protein, 180 aa, Homo sapiens
MQAEGRGTGGSTGDADGPGGPGIPDGPGGNAGGPGEAGATGGRGPRGAGAARASGPGGGAPRGPHGGAASGLNGCCRCGARGPESRLLEFYLAMPFATPMEAELARRSLAQDAPPLPVPGVLLKEFTVSGNILTIRLTAADHRQLQLSISSCLQQLSLLMWITQCFLPVFLAQPPSGQRR

SEQ ID NO: 457 - protein, 1259 aa, Canis lupus
MELAAWCRWGLLLALLPSGAAGTQVCTGTDMKLRLPASPETHLDMLRHLYQGCQVVQGNLELTYLPANASLSFLQDIQEVQGYVLIAHSQVRQIPLQRLRIVRGTQLFEDNYALAVLDNGDPLEGGIPAPGAAQGGLRELQLRSLTEILKGGVLIQRSPQLCHQDTILWKDVFHKNNQLALTLIDTNRFSACPPCSPACKDAHCWGASSGDCQSLTRTVCAGGCARCKGPQPTDCCHEQCAAGCTGPKHSDCLACLHFNHSGICELHCPALVTYNTDTFESMPNPEGRYTFGASCVTSCPYNYLSTDVGSCTLVCPLNNQEVTAEDGTQRCEKCSKPCARVCYGLGMEHLREVRAVTSANIQEFAGCKKIFGSLAFLPESFDGDPASNTAPLQPEQLRVFEALEEITGYLYISAWPDSLPNLSVFQNLRVIRGRVLHDGAYSLTLQGLGISWLGLRSLRELGSGLALIHRNARLCFVHTVPWDQLFRNPHQALLHSANRPEEECVGEGLACYPCAHGHCWGPGPTQCVNCSQFLRGQECVEECRVLQGLPREYVKDRYCLPCHSECQPQNGSVTCFGSEADQCVACAHYKDPPFCVARCPSGVKPDLSFMPIWKFADEEGTCQPCPINCTHSCADLDEKGCPAEQRASPVTSIIAAVVGILLAVVVGLVLGILIKRRRQKIRKYTMRRLLQETELVEPLTPSGAMPNQAQMRILKETELRKVKVLGSGAFGTVYKGIWIPDGENVKIPVAIKVLRENTSPKANKEILDEAYVMAGVGSPYVSRLLGICLTSTVQLVTQLMPYGCLLDHVREHRGRLGSQDLLNWCVQIAKGMSYLEDVRLVHRDLAARNVLVKSPNHVKITDFGLARLLDIDETEYHADGGKVPIKWMALESIPPRRFTHQSDVWSYGVTVWELMTFGAKPYDGIPAREIPDLLEKGERLPQPPICTIDVYMIMVKCWMIDSECRPRFRELVAEFSRMARDPQRFVVIQNEDLGPASPLDSTFYRSLLEDDDMGDLVDAEEYLVPQQGFFCPEPTPGAGGTAHRRHRSSSTRNGGGELTLGLEPSEEEPPKSPLAPSEGAGSDVFDGDLGMGAAKGLQSLPSQDPSPLQRYSEDPTVPLPPETDGKVAPLTCSPQPEYVNQPEVWPQPPLALEGPLPPSRPAGATLERPKTLSPKTLSPGKNGVVKDVFAFGSAVENPEYLAPRGRAAPQPHPPPAFSPAFDNLYYWDQDPSERGSPPSTFEGTPTAENPEYLGLDVPV

SEQ ID NO: 458 - protein, 13 aa, Artificial Sequence
  SYNTHETIC CONSTRUCT DERIVED FROM HUMAN THOUGHT
GCCGCCACCATGG

SEQ ID NO: 459 - protein, 5 aa, Artificial Sequence
  SYNTHETIC CONSTRUCT DERIVED FROM HUMAN THOUGHT
GGGGS

SEQ ID NO: 460 - protein, 4 aa, Artificial Sequence
  SYNTHETIC CONSTRUCT DERIVED FROM HUMAN THOUGHT
GGGS

SEQ ID NO: 461 - protein, 4 aa, Artificial Sequence
  SYNTHETIC CONSTRUCT DERIVED FROM HUMAN THOUGHT
SGGG

SEQ ID NO: 462 - protein, 11 aa, Artificial Sequence
  SYNTHETIC CONSTRUCT DERIVED FROM HUMAN THOUGHT
GSGGGTGGGSG

SEQ ID NO: 463 - protein, 6 aa, Artificial Sequence
  SYNTHETIC CONSTRUCT DERIVED FROM HUMAN THOUGHT
GSGSGS

SEQ ID NO: 464 - protein, 10 aa, Artificial Sequence
  SYNTHETIC CONSTRUCT DERIVED FROM HUMAN THOUGHT
GSGSGSGSGS

SEQ ID NO: 465 - protein, 8 aa, Artificial Sequence
  SYNTHETIC CONSTRUCT DERIVED FROM HUMAN THOUGHT
GGGSGGGS

SEQ ID NO: 466 - protein, 10 aa, Artificial Sequence
  SYNTHETIC CONSTRUCT DERIVED FROM HUMAN THOUGHT
GGGGSGGGGS

SEQ ID NO: 467 - protein, 13 aa, Artificial Sequence
  SYNTHETIC CONSTRUCT DERIVED FROM HUMAN THOUGHT
GGGSGGGGSGGGS

SEQ ID NO: 468 - protein, 4 aa, Artificial Sequence
  SYNTHETIC CONSTRUCT DERIVED FROM HUMAN THOUGHT
GGSG

SEQ ID NO: 469 - protein, 8 aa, Artificial Sequence
  SYNTHETIC CONSTRUCT DERIVED FROM HUMAN THOUGHT
GGSGGGSG

SEQ ID NO: 470 - protein, 12 aa, Artificial Sequence
  SYNTHETIC CONSTRUCT DERIVED FROM HUMAN THOUGHT
GGSGGGSGGGSG

SEQ ID NO: 471 - protein, 6 aa, Artificial Sequence
  SYNTHETIC CONSTRUCT DERIVED FROM HUMAN THOUGHT
GGSGGS

SEQ ID NO: 472 - protein, 5 aa, Artificial Sequence
  SYNTHETIC CONSTRUCT DERIVED FROM HUMAN THOUGHT
SGGGG

SEQ ID NO: 473 - protein, 12 aa, Artificial Sequence
  SYNTHETIC CONSTRUCT DERIVED FROM HUMAN THOUGHT
SGGGGSGGGGIG

SEQ ID NO: 474 - protein, 10 aa, Artificial Sequence
  SYNTHETIC CONSTRUCT DERIVED FROM HUMAN THOUGHT
SGGGGSGGGG

SEQ ID NO: 475 - protein, 4 aa, Artificial Sequence
  SYNTHETIC CONSTRUCT DERIVED FROM HUMAN THOUGHT
AAAA

SEQ ID NO: 476 - protein, 5 aa, Artificial Sequence
  SYNTHETIC CONSTRUCT DERIVED FROM HUMAN THOUGHT
EAAAK

SEQ ID NO: 477 - protein, 12 aa, Artificial Sequence
  SYNTHETIC CONSTRUCT DERIVED FROM HUMAN THOUGHT
AEAAAKEAAAKA

SEQ ID NO: 478 - protein, 13 aa, Artificial Sequence
  SYNTHETIC CONSTRUCT DERIVED FROM HUMAN THOUGHT
EAEAAAKEAAAKA

SEQ ID NO: 479 - protein, 7 aa, Artificial Sequence
  SYNTHETIC CONSTRUCT DERIVED FROM HUMAN THOUGHT
EPKSCDK

SEQ ID NO: 480 - protein, 7 aa, Artificial Sequence
  SYNTHETIC CONSTRUCT DERIVED FROM HUMAN THOUGHT
IEGRDMD

SEQ ID NO: 481 - protein, 5 aa, Artificial Sequence
  SYNTHETIC CONSTRUCT DERIVED FROM HUMAN THOUGHT
PAPAP

SEQ ID NO: 482 - protein, 23 aa, Artificial Sequence
  SYNTHETIC CONSTRUCT DERIVED FROM HUMAN THOUGHT
ITPNGSIPNDKPFQNVNKITYGA

SEQ ID NO: 483 - protein, 4 aa, Artificial Sequence
  SYNTHETIC CONSTRUCT DERIVED FROM HUMAN THOUGHT
GFLG

SEQ ID NO: 484 - protein, 4 aa, Artificial Sequence
  SYNTHETIC CONSTRUCT DERIVED FROM HUMAN THOUGHT
ALAL

SEQ ID NO: 485 - protein, 9 aa, Artificial Sequence
  SYNTHETIC CONSTRUCT DERIVED FROM HUMAN THOUGHT
VDGGSGGGS

SEQ ID NO: 486 - protein, 16 aa, Artificial Sequence
  SYNTHETIC CONSTRUCT DERIVED FROM HUMAN THOUGHT
GGGGSLVPRGSGGGGS

SEQ ID NO: 487 - protein, 12 aa, Artificial Sequence
  SYNTHETIC CONSTRUCT DERIVED FROM HUMAN THOUGHT
SGGGGSGGGGIG

SEQ ID NO: 488 - protein, 4 aa, Artificial Sequence
  SYNTHETIC CONSTRUCT DERIVED FROM HUMAN THOUGHT
RVKR

SEQ ID NO: 489 - protein, 4 aa, Artificial Sequence
  SYNTHETIC CONSTRUCT DERIVED FROM HUMAN THOUGHT
VRVV

SEQ ID NO: 490 - protein, 25 aa, Artificial Sequence
  SYNTHETIC CONSTRUCT DERIVED FROM HUMAN THOUGHT
SSVSPTTSVHPTPTSVPPTPTKSSP

SEQ ID NO: 491 - protein, 25 aa, Artificial Sequence
  SYNTHETIC CONSTRUCT DERIVED FROM HUMAN THOUGHT
PTSTPADSSTITPTATPTATPTIKG

SEQ ID NO: 492 - protein, 25 aa, Artificial Sequence
  SYNTHETIC CONSTRUCT DERIVED FROM HUMAN THOUGHT
TVTPTATATPSAIVTTITPTATTKP

SEQ ID NO: 493 - protein, 25 aa, Artificial Sequence
  SYNTHETIC CONSTRUCT DERIVED FROM HUMAN THOUGHT
TNGSITVAATAPTVTPTVNATPSAA

SEQ ID NO: 494 - protein, 17 aa, Homo sapiens
VSQTSKLTRAETVFPDV

SEQ ID NO: 495 - protein, 6 aa, Homo sapiens
PLGLWA

SEQ ID NO: 496 - protein, 10 aa, Homo sapiens
EDVVCCSMSY

SEQ ID NO: 497 - protein, 8 aa, Homo sapiens
GGIEGRGS

SEQ ID NO: 498 - protein, 10 aa, Homo sapiens
TRHRQPRGWE

SEQ ID NO: 499 - protein, 10 aa, Homo sapiens
AGNRVRRSVG

SEQ ID NO: 500 - protein, 9 aa, Homo sapiens
RRRRRRRRR

SEQ ID NO: 501 - protein, 4 aa, Homo sapiens
GFLG

SEQ ID NO: 502 - protein, 4 aa, Homo sapiens
IEGR

SEQ ID NO: 503 - protein, 6 aa, Homo sapiens
LVPRGS

SEQ ID NO: 504 - protein, 5 aa, Homo sapiens
VIAGR

SEQ ID NO: 505 - protein, 19 aa, porcine teschovirus-1 2A
ATNFSLLKQAGDVEENPGP

SEQ ID NO: 506 - protein, 20 aa, equine rhinitis A virus
QCTNYALLKLAGDVESNPGP

SEQ ID NO: 507 - protein, 22 aa, foot-and-mouth disease virus 18
VKQTLNFDLLKLAGDVESNPGP

SEQ ID NO: 508 - protein, 18 aa, thosea asigna virus 2A
EGRGSLLTCGDVEENPGP

SEQ ID NO: 509 - protein, 5 aa, Homo sapiens
KKKRK

SEQ ID NO: 510 - protein, 26 aa, Homo sapiens
MLRTSSLFTRRVQPSLFRNILRLQST

SEQ ID NO: 511 - protein, 4 aa, Homo sapiens
KDEL

SEQ ID NO: 512 - protein, 4 aa, Artificial Sequence
  SYNTHETIC CONSTRUCT DERIVED FROM HUMAN THOUGHT
  MISC_FEATURE (1)..(4): X is any amino acid
CAAX

SEQ ID NO: 513 - protein, 4 aa, Artificial Sequence
  SYNTHETIC CONSTRUCT DERIVED FROM HUMAN THOUGHT
  MISC_FEATURE (1)..(4): X is any amino acid
CCXX

SEQ ID NO: 514 - protein, 5 aa, Homo sapiens
KFERQ

SEQ ID NO: 515 - protein, 4 aa, Artificial Sequence
  SYNTHETIC CONSTRUCT DERIVED FROM HUMAN THOUGHT
  MISC_FEATURE (1)..(4): X is any amino acid
KKXX

SEQ ID NO: 516 - protein, 4 aa, Homo sapiens
YQRL

SEQ ID NO: 517 - protein, 47 aa, Artificial Sequence
  SYNTHETIC CONSTRUCT DERIVED FROM HUMAN THOUGHT
LEIRAAFLRQRNTALRTEVAELEQEVQRLENEVSQYETRYGPLGGGK

SEQ ID NO: 518 - protein, 47 aa, Artificial Sequence
  SYNTHETIC CONSTRUCT DERIVED FROM HUMAN THOUGHT
LEIEAAFLERENTALETRVAELRQRVQRLRNRVSQYRTRYGPLGGGK

SEQ ID NO: 519 - protein, 33 aa, Artificial Sequence
  SYNTHETIC CONSTRUCT DERIVED FROM HUMAN THOUGHT
RMKQIEDKIEEILSKIYHIENEIARIKKLIGER

SEQ ID NO: 520 - protein, 32 aa, Artificial Sequence
  SYNTHETIC CONSTRUCT DERIVED FROM HUMAN THOUGHT
LSSIEKKQEEQTSWLIWISNELTLIRNELAQS

SEQ ID NO: 521 - protein, 34 aa, Artificial Sequence
  SYNTHETIC CONSTRUCT DERIVED FROM HUMAN THOUGHT
MKQIEDKIEEILSKIYHIENEIARIKKLIGERAG

SEQ ID NO: 522 - protein, 31 aa, Artificial Sequence
  SYNTHETIC CONSTRUCT DERIVED FROM HUMAN THOUGHT
LSSIEKKLEEITSQLIQISNELTLIRNELAQ

SEQ ID NO: 523 - protein, 31 aa, Artificial Sequence
  SYNTHETIC CONSTRUCT DERIVED FROM HUMAN THOUGHT
LSSIEKKLEEITSQLQQIRNELTLIRNELAQ

SEQ ID NO: 524 - protein, 31 aa, Artificial Sequence
  SYNTHETIC CONSTRUCT DERIVED FROM HUMAN THOUGHT
LSSLEKKLEELTSQLIQLRNELTLLRNELAQ

SEQ ID NO: 525 - protein, 31 aa, Artificial Sequence
  SYNTHETIC CONSTRUCT DERIVED FROM HUMAN THOUGHT
ISSLEKKIEELTSQIQQLRNEITLLRNEIAQ

SEQ ID NO: 526 - protein, 47 aa, Artificial Sequence; identical to SEQ ID NO: 518
  SYNTHETIC CONSTRUCT DERIVED FROM HUMAN THOUGHT

SEQ ID NO: 527 - protein, 64 aa, Artificial Sequence
  SYNTHETIC CONSTRUCT DERIVED FROM HUMAN THOUGHT
VTAFSNMDDMLQKAHLVIEGTFIYLRDSTEFFIRVRDGWKKLQLGELIPIPADSPPPPALSSNP

SEQ ID NO: 528 - protein, 31 aa, Artificial Sequence
  SYNTHETIC CONSTRUCT DERIVED FROM HUMAN THOUGHT
LKSVENRLAVVENQLKTVIEELKTVKDLLSN

SEQ ID NO: 529 - protein, 31 aa, Artificial Sequence
  SYNTHETIC CONSTRUCT DERIVED FROM HUMAN THOUGHT
LARIEEKLKTIKAQLSEIASTLNMIREQLAQ

SEQ ID NO: 530 - protein, 31 aa, Artificial Sequence
  SYNTHETIC CONSTRUCT DERIVED FROM HUMAN THOUGHT
VSRLEEKVKTLKSQVTELASTVSLLREQVAQ

SEQ ID NO: 531 - protein, 30 aa, Artificial Sequence
  SYNTHETIC CONSTRUCT DERIVED FROM HUMAN THOUGHT
IQSEKKIEDISSLIGQIQSEITLIRNEIAQ

SEQ ID NO: 532 - protein, 31 aa, Artificial Sequence
  SYNTHETIC CONSTRUCT DERIVED FROM HUMAN THOUGHT
LMSLEKKLEELTQTLMQLQNELSMLKNELAQ

SEQ ID NO: 533 - protein, 157 aa, Homo sapiens
VRSSSRTPSDKPVAHVVANPQAEGQLQWLNRRANALLANGVELRDNQLVVPSEGLYLIYSQVLFKGQGCPSTHVLLTHTISRIAVSSQTKVNLLSAIKSPCQRETPEGAEAKPWYEPIYLGGVFQLEKGDRLSAEINRPDYLDFAESGQVYFGIIAL

SEQ ID NO: 534 - protein, 40 aa, Artificial Sequence
  SYNTHETIC CONSTRUCT DERIVED FROM HUMAN THOUGHT
SHGFPPEVEEQDDGTLPMSCAQESGMDRHPAACASARINV

SEQ ID NO: 535 - protein, 17 aa, Artificial Sequence
  SYNTHETIC CONSTRUCT DERIVED FROM HUMAN THOUGHT
HNPSERLPLAQVSAHPW

SEQ ID NO: 536 - protein, 17 aa, Artificial Sequence
  SYNTHETIC CONSTRUCT DERIVED FROM HUMAN THOUGHT
LCSKLRNLLHDNELSDL

SEQ ID NO: 537 - protein, 17 aa, Artificial Sequence
  SYNTHETIC CONSTRUCT DERIVED FROM HUMAN THOUGHT
AWAHSRAALDRLEKLLR

SEQ ID NO: 538 - protein, 17 aa, Artificial Sequence
  SYNTHETIC CONSTRUCT DERIVED FROM HUMAN THOUGHT
FIFMRRSSLLSRSSSGY

SEQ ID NO: 539 - protein, 17 aa, Artificial Sequence
  SYNTHETIC CONSTRUCT DERIVED FROM HUMAN THOUGHT
GPFATRSPLFIFMRRSS

SEQ ID NO: 540 - protein, 17 aa, Artificial Sequence
  SYNTHETIC CONSTRUCT DERIVED FROM HUMAN THOUGHT
SSVPQRSTLAELKSKGK

SEQ ID NO: 541 - protein, 15 aa, Artificial Sequence
  SYNTHETIC CONSTRUCT DERIVED FROM HUMAN THOUGHT
QQPRTRAALAVLKSG

SEQ ID NO: 542 - protein, 17 aa, Artificial Sequence
  SYNTHETIC CONSTRUCT DERIVED FROM HUMAN THOUGHT
PGLRPRTALGDIGNKVS

SEQ ID NO: 543 - protein, 17 aa, Artificial Sequence
  SYNTHETIC CONSTRUCT DERIVED FROM HUMAN THOUGHT
GALKKRSAFEDLTNASQ

SEQ ID NO: 544 - protein, 17 aa, Artificial Sequence
  SYNTHETIC CONSTRUCT DERIVED FROM HUMAN THOUGHT
LPLSPRKRLGDDNLCNT

SEQ ID NO: 545 - protein, 17 aa, Artificial Sequence
  SYNTHETIC CONSTRUCT DERIVED FROM HUMAN THOUGHT
SKVLGRSPLTILQDDNS

SEQ ID NO: 546 - protein, 17 aa, Artificial Sequence
  SYNTHETIC CONSTRUCT DERIVED FROM HUMAN THOUGHT
GPRRGRDELGGGRRPGT

SEQ ID NO: 547 - protein, 17 aa, Artificial Sequence
  SYNTHETIC CONSTRUCT DERIVED FROM HUMAN THOUGHT
TKIAHRKSLSQKENRHK

SEQ ID NO: 548 - protein, 17 aa, Artificial Sequence
  SYNTHETIC CONSTRUCT DERIVED FROM HUMAN THOUGHT
VTCLLRKRLPVTNEMVH

SEQ ID NO: 549 - protein, 17 aa, Artificial Sequence
  SYNTHETIC CONSTRUCT DERIVED FROM HUMAN THOUGHT
LEIRDRMWLKITIANAV

SEQ ID NO: 550 - protein, 17 aa, Artificial Sequence
  SYNTHETIC CONSTRUCT DERIVED FROM HUMAN THOUGHT
VANSYRGTLKRQPAFDT

SEQ ID NO: 551 - protein, 17 aa, Artificial Sequence
  SYNTHETIC CONSTRUCT DERIVED FROM HUMAN THOUGHT
RQFQRRLPLRAVNLRAG

SEQ ID NO: 552 - protein, 17 aa, Artificial Sequence
  SYNTHETIC CONSTRUCT DERIVED FROM HUMAN THOUGHT
DKKRPRRSLSISKNKKK

SEQ ID NO: 553 - protein, 17 aa, Artificial Sequence
  SYNTHETIC CONSTRUCT DERIVED FROM HUMAN THOUGHT
EYVMFRTPLASVQKSAA

SEQ ID NO: 554 - protein, 16 aa, Artificial Sequence
  SYNTHETIC CONSTRUCT DERIVED FROM HUMAN THOUGHT
EYVMFRTPLASVQKSA

SEQ ID NO: 555 - protein, 17 aa, Artificial Sequence
  SYNTHETIC CONSTRUCT DERIVED FROM HUMAN THOUGHT
NSSVPRRTLKMIQPSAS

SEQ ID NO: 556 - protein, 17 aa, Artificial Sequence
  SYNTHETIC CONSTRUCT DERIVED FROM HUMAN THOUGHT
FVLQLRPELQDALISII

SEQ ID NO: 557 - protein, 17 aa, Artificial Sequence
  SYNTHETIC CONSTRUCT DERIVED FROM HUMAN THOUGHT
EHAAFRFALSQLTEPPK

SEQ ID NO: 558 - protein, 17 aa, Artificial Sequence
  SYNTHETIC CONSTRUCT DERIVED FROM HUMAN THOUGHT
EVWQRRGSLEGAAAAAE

SEQ ID NO: 559 - protein, 17 aa, Artificial Sequence
  SYNTHETIC CONSTRUCT DERIVED FROM HUMAN THOUGHT
ENFALKTPLKEGNTNCY

SEQ ID NO: 560 - protein, 17 aa, Artificial Sequence
  SYNTHETIC CONSTRUCT DERIVED FROM HUMAN THOUGHT
EVSKLRCQLAKKKQSET

SEQ ID NO: 561 - protein, 17 aa, Artificial Sequence
  SYNTHETIC CONSTRUCT DERIVED FROM HUMAN THOUGHT
WFQNRRMKLKKMNRENR

SEQ ID NO: 562 - protein, 17 aa, Artificial Sequence
  SYNTHETIC CONSTRUCT DERIVED FROM HUMAN THOUGHT
APFEQRASLNPRAEHLE

SEQ ID NO: 563 - protein, 17 aa, Artificial Sequence
  SYNTHETIC CONSTRUCT DERIVED FROM HUMAN THOUGHT
SLLKERKFLSLASNPEL

SEQ ID NO: 564 - protein, 17 aa, Artificial Sequence
  SYNTHETIC CONSTRUCT DERIVED FROM HUMAN THOUGHT
LDPSNRKPLTVLNKGLE

SEQ ID NO: 565 - protein, 17 aa, Artificial Sequence
  SYNTHETIC CONSTRUCT DERIVED FROM HUMAN THOUGHT
LPKATRKALGTVNRATE

SEQ ID NO: 566 - protein, 17 aa, Artificial Sequence
  SYNTHETIC CONSTRUCT DERIVED FROM HUMAN THOUGHT
VGGEKRLCLPQVLNSVL

SEQ ID NO: 567 - protein, 14 aa, Artificial Sequence
  SYNTHETIC CONSTRUCT DERIVED FROM HUMAN THOUGHT
MHRKHLQEIPDLSS

SEQ ID NO: 568 - protein, 13 aa, Artificial Sequence
  SYNTHETIC CONSTRUCT DERIVED FROM HUMAN THOUGHT
GGEAQKENGIYSV

SEQ ID NO: 569 - protein, 13 aa, Artificial Sequence
  SYNTHETIC SEQUENCE DERIVED FROM HUMAN THOUGHT
HILEDKENVVAKQ

SEQ ID NO: 570 - protein, 13 aa, Artificial Sequence
  SYNTHETIC CONSTRUCT DERIVED FROM HUMAN THOUGHT
FEDGNKENYGLPQ

SEQ ID NO: 571 - protein, 13 aa, Artificial Sequence
  SYNTHETIC CONSTRUCT DERIVED FROM HUMAN THOUGHT
PMPRAKENELQAG

SEQ ID NO: 572 - protein, 13 aa, Artificial Sequence
  SYNTHETIC CONSTRUCT DERIVED FROM HUMAN THOUGHT
EWELSKENVQPLR

SEQ ID NO: 573 - protein, 13 aa, Artificial Sequence
  SYNTHETIC CONSTRUCT DERIVED FROM HUMAN THOUGHT
SFLLSKENQPENS

SEQ ID NO: 574 - protein, 13 aa, Artificial Sequence
  SYNTHETIC CONSTRUCT DERIVED FROM HUMAN THOUGHT
DPDENKENEAFEF

SEQ ID NO: 575 - protein, 13 aa, Artificial Sequence
  SYNTHETIC CONSTRUCT DERIVED FROM HUMAN THOUGHT
SSGEDKENDGFVF

SEQ ID NO: 576 - protein, 13 aa, Artificial Sequence
  SYNTHETIC CONSTRUCT DERIVED FROM HUMAN THOUGHT
SSSANKENDNGNL

SEQ ID NO: 577 - protein, 13 aa, Artificial Sequence
  SYNTHETIC CONSTRUCT DERIVED FROM HUMAN THOUGHT
PKQGKKENGPPHS

SEQ ID NO: 578 - protein, 13 aa, Artificial Sequence
  SYNTHETIC CONSTRUCT DERIVED FROM HUMAN THOUGHT
ENSSQKENVFKCD

SEQ ID NO: 579 - protein, 13 aa, Artificial Sequence
  SYNTHETIC CONSTRUCT DERIVED FROM HUMAN THOUGHT
QEMEEKENCHLEQ

SEQ ID NO: 580 - protein, 13 aa, Artificial Sequence
  SYNTHETIC CONSTRUCT DERIVED FROM HUMAN THOUGHT
DVILLKENSTAFE

SEQ ID NO: 581 - protein, 13 aa, Artificial Sequence
  SYNTHETIC CONSTRUCT DERIVED FROM HUMAN THOUGHT
SHGKDKENRGINT

SEQ ID NO: 582 - protein, 13 aa, Artificial Sequence
  SYNTHETIC CONSTRUCT DERIVED FROM HUMAN THOUGHT
QKAEEKENHCPTM

SEQ ID NO: 583 - protein, 13 aa, Artificial Sequence
  SYNTHETIC CONSTRUCT DERIVED FROM HUMAN THOUGHT
FSGESKENIMRSE

SEQ ID NO: 584 - protein, 13 aa, Artificial Sequence
  SYNTHETIC CONSTRUCT DERIVED FROM HUMAN THOUGHT
LTLALKENSRLQK

SEQ ID NO: 585 - protein, 13 aa, Artificial Sequence
  SYNTHETIC CONSTRUCT DERIVED FROM HUMAN THOUGHT
PWGQSKENNYLNQ

SEQ ID NO: 586 - protein, 13 aa, Artificial Sequence
  SYNTHETIC CONSTRUCT DERIVED FROM HUMAN THOUGHT
PKDSEKENQIPEE

SEQ ID NO: 587 - protein, 13 aa, Artificial Sequence
  SYNTHETIC CONSTRUCT DERIVED FROM HUMAN THOUGHT
ILHFAKENDFKAF

SEQ ID NO: 588 - protein, 13 aa, Artificial Sequence
  SYNTHETIC CONSTRUCT DERIVED FROM HUMAN THOUGHT
TQHPEKENEGDIT

SEQ ID NO: 589 - protein, 13 aa, Artificial Sequence
  SYNTHETIC CONSTRUCT DERIVED FROM HUMAN THOUGHT
AGPDNKENCPVPG

SEQ ID NO: 590 - protein, 16 aa, Artificial Sequence
  SYNTHETIC CONSTRUCT DERIVED FROM HUMAN THOUGHT
SLSSAFHVFEDGNKEN

SEQ ID NO: 591 - protein, 16 aa, Artificial Sequence
  SYNTHETIC CONSTRUCT DERIVED FROM HUMAN THOUGHT
GPSVPFSIFDEFLLSE

SEQ ID NO: 592 - protein, 16 aa, Artificial Sequence
  SYNTHETIC CONSTRUCT DERIVED FROM HUMAN THOUGHT
QNNSRITVFDENADEA

SEQ ID NO: 593 - protein, 16 aa, Artificial Sequence
  SYNTHETIC CONSTRUCT DERIVED FROM HUMAN THOUGHT
AVLPSFTPYVEETARQ

SEQ ID NO: 594 - protein, 16 aa, Artificial Sequence
  SYNTHETIC CONSTRUCT DERIVED FROM HUMAN THOUGHT
SKQPAFTIHVDEAEKE

SEQ ID NO: 595 - protein, 7 aa, Artificial Sequence
  SYNTHETIC CONSTRUCT DERIVED FROM HUMAN THOUGHT
ISKGNLR

SEQ ID NO: 596 - protein, 7 aa, Artificial Sequence
  SYNTHETIC CONSTRUCT DERIVED FROM HUMAN THOUGHT
RQILGMR

SEQ ID NO: 597 - protein, 12 aa, Artificial Sequence
  SYNTHETIC CONSTRUCT DERIVED FROM HUMAN THOUGHT
GTKKSKKNLRRL

SEQ ID NO: 598 - protein, 4 aa, Artificial Sequence
  SYNTHETIC CONSTRUCT DERIVED FROM HUMAN THOUGHT
HDEF

SEQ ID NO: 599 - protein, 4 aa, Artificial Sequence
  SYNTHETIC CONSTRUCT DERIVED FROM HUMAN THOUGHT
HDEL

SEQ ID NO: 600 - protein, 4 aa, Artificial Sequence
  SYNTHETIC CONSTRUCT DERIVED FROM HUMAN THOUGHT
RDEF

SEQ ID NO: 601 - protein, 4 aa, Artificial Sequence
  SYNTHETIC CONSTRUCT DERIVED FROM HUMAN THOUGHT
RDEL

SEQ ID NO: 602 - protein, 4 aa, Artificial Sequence
  SYNTHETIC CONSTRUCT DERIVED FROM HUMAN THOUGHT
WDEL

SEQ ID NO: 603 - protein, 4 aa, Artificial Sequence
  SYNTHETIC CONSTRUCT DERIVED FROM HUMAN THOUGHT
YDEL

SEQ ID NO: 604 - protein, 4 aa, Artificial Sequence
  SYNTHETIC CONSTRUCT DERIVED FROM HUMAN THOUGHT
HEEF

SEQ ID NO: 605 - protein, 4 aa, Artificial Sequence
  SYNTHETIC CONSTRUCT DERIVED FROM HUMAN THOUGHT
HEEL

SEQ ID NO: 606 - protein, 4 aa, Artificial Sequence
  SYNTHETIC CONSTRUCT DERIVED FROM HUMAN THOUGHT
KEEL

SEQ ID NO: 607 - protein, 4 aa, Artificial Sequence
  SYNTHETIC CONSTRUCT DERIVED FROM HUMAN THOUGHT
REEL

SEQ ID NO: 608 - protein, 4 aa, Artificial Sequence
  SYNTHETIC CONSTRUCT DERIVED FROM HUMAN THOUGHT
KAEL

SEQ ID NO: 609 - protein, 4 aa, Artificial Sequence
  SYNTHETIC CONSTRUCT DERIVED FROM HUMAN THOUGHT
KCEL

SEQ ID NO: 610 - protein, 4 aa, Artificial Sequence
  SYNTHETIC CONSTRUCT DERIVED FROM HUMAN THOUGHT
KFEL

SEQ ID NO: 611 - protein, 4 aa, Artificial Sequence
  SYNTHETIC CONSTRUCT DERIVED FROM HUMAN THOUGHT
KGEL

SEQ ID NO: 612 - protein, 4 aa, Artificial Sequence
  SYNTHETIC CONSTRUCT DERIVED FROM HUMAN THOUGHT
KHEL

SEQ ID NO: 613 - protein, 4 aa, Artificial Sequence
  SYNTHETIC CONSTRUCT DERIVED FROM HUMAN THOUGHT
KLEL

SEQ ID NO: 614 - protein, 4 aa, Artificial Sequence
  SYNTHETIC CONSTRUCT DERIVED FROM HUMAN THOUGHT
KNEL

SEQ ID NO: 615 - protein, 4 aa, Artificial Sequence
  SYNTHETIC CONSTRUCT DERIVED FROM HUMAN THOUGHT
KQEL

SEQ ID NO: 616 - protein, 4 aa, Artificial Sequence
  SYNTHETIC CONSTRUCT DERIVED FROM HUMAN THOUGHT
KREL

SEQ ID NO: 617 - protein, 4 aa, Artificial Sequence
  SYNTHETIC CONSTRUCT DERIVED FROM HUMAN THOUGHT
KSEL

SEQ ID NO: 618 - protein, 4 aa, Artificial Sequence
  SYNTHETIC CONSTRUCT DERIVED FROM HUMAN THOUGHT
KVEL

SEQ ID NO: 619 - protein, 4 aa, Artificial Sequence
  SYNTHETIC CONSTRUCT DERIVED FROM HUMAN THOUGHT
KWEL

SEQ ID NO: 620 - protein, 4 aa, Artificial Sequence
  SYNTHETIC CONSTRUCT DERIVED FROM HUMAN THOUGHT
KYEL

SEQ ID NO: 621 - protein, 4 aa, Artificial Sequence
  SYNTHETIC CONSTRUCT DERIVED FROM HUMAN THOUGHT
KEDL

SEQ ID NO: 622 - protein, 4 aa, Artificial Sequence
  SYNTHETIC CONSTRUCT DERIVED FROM HUMAN THOUGHT
KIEL

SEQ ID NO: 623 - protein, 4 aa, Artificial Sequence
  SYNTHETIC CONSTRUCT DERIVED FROM HUMAN THOUGHT
DKEL

SEQ ID NO: 624 - protein, 4 aa, Artificial Sequence
  SYNTHETIC CONSTRUCT DERIVED FROM HUMAN THOUGHT
FDEL

SEQ ID NO: 625 - protein, 4 aa, Artificial Sequence
  SYNTHETIC CONSTRUCT DERIVED FROM HUMAN THOUGHT
KDEF

SEQ ID NO: 626 - protein, 4 aa, Artificial Sequence
  SYNTHETIC CONSTRUCT DERIVED FROM HUMAN THOUGHT
KKEL

SEQ ID NO: 627 - protein, 4 aa, Artificial Sequence
  SYNTHETIC CONSTRUCT DERIVED FROM HUMAN THOUGHT
HADL

SEQ ID NO: 628 - protein, 4 aa, Artificial Sequence
  SYNTHETIC CONSTRUCT DERIVED FROM HUMAN THOUGHT
HAEL

SEQ ID NO: 629 - protein, 4 aa, Artificial Sequence
  SYNTHETIC CONSTRUCT DERIVED FROM HUMAN THOUGHT
HIEL

SEQ ID NO: 630 - protein, 4 aa, Artificial Sequence
  SYNTHETIC CONSTRUCT DERIVED FROM HUMAN THOUGHT
HNEL

SEQ ID NO: 631 - protein, 4 aa, Artificial Sequence
  SYNTHETIC CONSTRUCT DERIVED FROM HUMAN THOUGHT
HTEL

SEQ ID NO: 632 - protein, 4 aa, Artificial Sequence
  SYNTHETIC CONSTRUCT DERIVED FROM HUMAN THOUGHT
KTEL

SEQ ID NO: 633 - protein, 4 aa, Artificial Sequence
  SYNTHETIC CONSTRUCT DERIVED FROM HUMAN THOUGHT
HVEL

SEQ ID NO: 634 - protein, 4 aa, Artificial Sequence
  SYNTHETIC CONSTRUCT DERIVED FROM HUMAN THOUGHT
NDEL

SEQ ID NO: 635 - protein, 4 aa, Artificial Sequence
  SYNTHETIC CONSTRUCT DERIVED FROM HUMAN THOUGHT
QDEL

SEQ ID NO: 636 - protein, 4 aa, Artificial Sequence
  SYNTHETIC CONSTRUCT DERIVED FROM HUMAN THOUGHT
REDL

SEQ ID NO: 637 - protein, 4 aa, Artificial Sequence
  SYNTHETIC CONSTRUCT DERIVED FROM HUMAN THOUGHT
RNEL

SEQ ID NO: 638 - protein, 4 aa, Artificial Sequence
  SYNTHETIC CONSTRUCT DERIVED FROM HUMAN THOUGHT
RTDL

SEQ ID NO: 639 - protein, 4 aa, Artificial Sequence
  SYNTHETIC CONSTRUCT DERIVED FROM HUMAN THOUGHT
RTEL

SEQ ID NO: 640 - protein, 4 aa, Artificial Sequence
  SYNTHETIC CONSTRUCT DERIVED FROM HUMAN THOUGHT
SDEL

SEQ ID NO: 641 - protein, 4 aa, Artificial Sequence
  SYNTHETIC CONSTRUCT DERIVED FROM HUMAN THOUGHT
TDEL

SEQ ID NO: 642 - protein, 4 aa, Artificial Sequence
  SYNTHETIC CONSTRUCT DERIVED FROM HUMAN THOUGHT
SKEL

SEQ ID NO: 643 - DNA, 52 bp, Artificial Sequence
  SYNTHETIC CONSTRUCT DERIVED FROM HUMAN THOUGHT
agctatgaggtacatgattttaggcttgctcgcccttgcggcagctgcaggc

SEQ ID NO: 644 - protein, 17 aa, Human adenovirus type 2
RYMILGLLALAAVCSAA

SEQ ID NO: 645 - protein, 18 aa, Human adenovirus type 2
MLLPVPLLLGLLGLAAAL

SEQ ID NO: 646 - protein, 15 aa, Bovine herpesvirus 1
DDELGLIMAAPARLV

SEQ ID NO: 647 - protein, 15 aa, Artificial Sequence
  SYNTHETIC CONSTRUCT DERIVED FROM HUMAN THOUGHT
DDELGLPMAAPARLV

SEQ ID NO: 648 - protein, 15 aa, Artificial Sequence
  SYNTHETIC CONSTRUCT DERIVED FROM HUMAN THOUGHT
DDELGLGMAAPARLV

SEQ ID NO: 649 - protein, 15 aa, Artificial Sequence
  SYNTHETIC CONSTRUCT DERIVED FROM HUMAN THOUGHT
DDELGLDMAAPARLV

SEQ ID NO: 650 - protein, 15 aa, mus
QGLVVHLSNPIMRNN

SEQ ID NO: 651 - protein, 15 aa, Artificial Sequence
  SYNTHETIC CONSTRUCT DERIVED FROM HUMAN THOUGHT
QGLVDHLSNPIMRNN

SEQ ID NO: 652 - protein, 15 aa, Artificial Sequence
  SYNTHETIC CONSTRUCT DERIVED FROM HUMAN THOUGHT
QGLVVHLSNPDMRNN

SEQ ID NO: 653 - protein, 15 aa, Artificial Sequence
  SYNTHETIC CONSTRUCT DERIVED FROM HUMAN THOUGHT
QGLVVHDSNPIMRNN

SEQ ID NO: 654 - protein, 42 aa, porcine circovirus 2 (virus)
MWLGSASSILLAGHVAAEVLPRCCRCRSALVILTAHFFRFQL

SEQ ID NO: 655 - protein, 314 aa, Artificial Sequence
  SYNTHETIC CONSTRUCT DERIVED FROM HUMAN THOUGHT
MPSKKNGRSGPQPHKRWVFTLNNPSEDERKKIRELPISLFDYFIVGEEGNEEGRTPHLQGFANFVKKQTFNKVKWYLGARCYIEKAKGTDQQNKEYCSKEGNLLIECGAPRSQGQRSDLSTAVSTLLESGSLVTVAEQHPVTFVRNFRGLAELLKVSGKMQKRDWKTNVHVIVGPPGCGKSKWAANFADPETTYWKPPRNKWWDGYHGEEVVVIDDFYGWLPWDDLLRLCDRYPLTVETKGGTVPFLARSILITSNQTPLEWYSSTAVPAVEALYRRITSLVFWKNATEQSTEEGGQFVTLSPPCPEFPYEINY

SEQ ID NO: 656 - protein, 314 aa, Artificial Sequence
  SYNTHETIC CONSTRUCT DERIVED FROM HUMAN THOUGHT
MPSKKNGRSGPQPHKRWVFTLNNPSEDERKKIRELPISLFDYFIVGEEGNEEGRTPHLQGFANFTKKQTFNKVKWYLGARCYIEKAKGTDQQNKEYCSKEGNLLIECGAPRSQGQRSDLSTAVSTLLESGSLVTVAEQHPVTFVRNFRGLAELLKVSGKMQKRDWKTNVHVIVGPPGCGKSKWAANFADPETTYWKPPRNKWWDGYHGEEVVVIDDFYGWLPWDDLLRLCDRYPLTVETKGGTVPFLARSILITSNQTPLEWYSSTAVPAVEALYRRITSLVFWKDATEQSTEEGGQFVTLSPPCPEFPYEINY

SEQ ID NO: 657 - protein, 314 aa, Artificial Sequence
  SYNTHETIC CONSTRUCT DERIVED FROM HUMAN THOUGHT
MPSKKNGRSGPQPHKRWVFTLNNPSEDERKKIRELPISLFDYFIVGEEGNEEGRTPHLQGFANFTKKQTFNKVKWYLGARCYIEKAKGTDQQNKEYCSKEGNLLIECGAPRSQGQRSDLSTAVSTLLESGSLVTVAEQHPVTFVRNFRGLAELLKVSGKMQKRDWKTNVHVIVGPPGCGKSKWAANFADPETTYWKPPRNKWWDGYHGEEVVVIDDFYGWLPWDDLLRLCDRYPLTVETKGGTVPFLARSILITSDQTPLEWYSSTAVPAVEALYRRITSLVFWKDATEQSTEEGGQFVTLSPPCPEFPYEINY

SEQ ID NO: 658 - protein, 104 aa, porcine circovirus 2 (virus)
MVTIPPLVSRWFPVCGFRVCKISSPFAFTTPRWPHNDVYIGLPITLLHFPAHFQKFSQPAEISDKRYRVLLCNGHQTPALQQGTHSSRQVTPLSLRSRSSTFNK

SEQ ID NO: 659 - protein, 59 aa, porcine circovirus 2 (virus)
MTCTLVFQSRFCIFPLTFKSSASPRKFLTNVTGCCSATVTRLPLSNKVLTAVDRSLRCP

SEQ ID NO: 660 - protein, 60 aa, Artificial Sequence
  SYNTHETIC CONSTRUCT DERIVED FROM HUMAN THOUGHT
MTCTLVFQSRFCIFPLTFKSSASPRKFLTDVTGCCSATVTRLPLSNKVLTAVDRSLRCPS

SEQ ID NO: 661 - protein, 21 aa, porcine circovirus 2 (virus)
MDIDHTVSVDHPTAASHKSHQ

SEQ ID NO: 662 - protein, 14 aa, porcine circovirus 2 (virus)
MKNKNHYEVIKKTQ

SEQ ID NO: 663 - protein, 53 aa, porcine circovirus 2 (virus)
MVFIFHLGFKWGVFKIKFSELYIHGYTDIVVLVVYTVFERSAEAYVVHISRGL

SEQ ID NO: 664 - protein, 29 aa, porcine circovirus 2 (virus)
MASSTPASPAPSDILSRLPQSERPPGRWT

SEQ ID NO: 665 - protein, 19 aa, porcine circovirus 2 (virus)
MAAGAVSSSAVTPPWIRHS

SEQ ID NO: 666 - protein, 234 aa, Artificial Sequence
  SYNTHETIC CONSTRUCT DERIVED FROM HUMAN THOUGHT
MTYPRRRYRRRRHRPRSHLGQILRRRPWLVHPRHRYRWRRKNGIFNTRLSRTFGYTVKATTVRTPSWAVDMMRFNIDDFVPPGGGTNKISIPFEYYRIRKVKVEFWPCSPITQGDRGVGSTAVILDDNFVTKATALTYDPYVDYSSRHTIPQPFSYHSRYFTPKPVLDSTIDYFQPNNKRTQLWLRLQTSRNVDHVGLGTAFENSIYDQDYNIRVTMYVQFREFNLKDPPLKPK

SEQ ID NO: 667 - protein, 235 aa, Artificial Sequence
  SYNTHETIC CONSTRUCT DERIVED FROM HUMAN THOUGHT
  MISC_FEATURE (1)..(235): X8 is Y or F, typically Y
  MISC_FEATURE (1)..(235): X53 is F or I, typically F
  MISC_FEATURE (1)..(235): X54 is G or V
  MISC_FEATURE (1)..(235): X57 is V or I, typically V
  MISC_FEATURE (1)..(235): X58 is K or N
  MISC_FEATURE (1)..(235): X59 is A or R
  MISC_FEATURE (1)..(235): X60 is T or S
  MISC_FEATURE (1)..(235): X61 is T or Q
  MISC_FEATURE (1)..(235): X63 is R, S, or T
  MISC_FEATURE (1)..(235): X75 is D, N, or K, typically D/N
  MISC_FEATURE (1)..(235): X76 is I or F, typically I
  MISC_FEATURE (1)..(235): X77 is D or N
  MISC_FEATURE (1)..(235): X78 is D or Q
  MISC_FEATURE (1)..(235): X86 is T or S
  MISC_FEATURE (1)..(235): X21 is Q, L, or H, typically Q
  MISC_FEATURE (1)..(235): X47 is T, A, or S, typically T/A
  MISC_FEATURE (1)..(235): X52 is T or S
  MISC_FEATURE (1)..(235): X88 is K or P
  MISC_FEATURE (1)..(235): X89 is I, R, or L
  MISC_FEATURE (1)..(235): X90 is S or T
  MISC_FEATURE (1)..(235): X106 is W of R
  MISC_FEATURE (1)..(235): X107 is P or A
  MISC_FEATURE (1)..(235): X108 is C or R
  MISC_FEATURE (1)..(235): X126 is T or S, usually T
  MISC_FEATURE (1)..(235): X143 is D or N, usually D
  MISC_FEATURE (1)..(235): X190 is S, A, or T, typically S or T
  MISC_FEATURE (1)..(235): X191 is R, G, or K, typically R or G
  MISC_FEATURE (1)..(235): X200 is T or H
  MISC_FEATURE (1)..(235): X203 is E or Q
  MISC_FEATURE (1)..(235): X206 is I, T, or K, typically T
  MISC_FEATURE (1)..(235): X207 is Y or N
  MISC_FEATURE (1)..(235): X208 is D or A
  MISC_FEATURE (1)..(235): X210 is D, E, or A, typically D or A
  MISC_FEATURE (1)..(235): X213 is I or V
  MISC_FEATURE (1)..(235): X215 is I or V, typically V
  MISC_FEATURE (1)..(235): X232 is K or N, typically K
  MISC_FEATURE (1)..(235): X234 is P, K, or is absent, typically P or K
  MISC_FEATURE (1)..(235): X235 is K or is absent
MTYPRRRXRRRRHRPRSHLGXILRRRPWLVHPRHRYRWRRKNGIFNXRLSRXXXYTXXXXXVXTPSWAVDMMRFXXXXFVPPGGGXNXXXIPFEYYRIRKVKVEFXXXSPITQGDRGVGSTAVILXDNFVTKATALTYDPYVXYSSRHTIPQPFSYHSRYFTPKPVLDSTIDYFQPNNKRNLWLRLQTXXNVDHVGLGXAFXNSXXXQXYNXRXTMYVQFREFNLKDPPLXXXXX

SEQ ID NO: 668 - protein, 17 aa, Porcine reproductive and respiratory syndrome virus
RRGDAPEIGLPYKLYPV

SEQ ID NO: 669 - protein, 12 aa, Porcine reproductive and respiratory syndrome virus
QAAAEAYEPGRS

SEQ ID NO: 670 - protein, 9 aa, Artificial Sequence
  SYNTHETIC CONSTRUCT DERIVED FROM HUMAN THOUGHT
SDQISLYAQ

SEQ ID NO: 671 - protein, 4 aa, Artificial Sequence
  SYNTHETIC CONSTRUCT DERIVED FROM HUMAN THOUGHT
KYKY

SEQ ID NO: 672 - protein, 20 aa, human influenza virus
NAELLVLMENERTLDFHDSN

SEQ ID NO: 673 - protein, 36 aa, human influenza virus
QDLEKYVEDTKIDLWSYNAELLVALENQHTIDLTDS

SEQ ID NO: 674 - protein, 15 aa, human influenza virus
KGILGFVFTLTVPSE

SEQ ID NO: 675 - protein, 40 aa, human influenza virus
KTGGPIYRRRDGKWVRELILYDKEEIRRIWRQANNGEDAT

SEQ ID NO: 676 - protein, 23 aa, human influenza virus
RLIQNSLTIERMVLSAFDERRNK

SEQ ID NO: 677 - protein, 18 aa, human influenza virus
GKWVRELILYDKEEIRRI

SEQ ID NO: 678 - protein, 9 aa, human influenza virus
VSDGGPNLY

SEQ ID NO: 679 - protein, 10 aa, human influenza virus
RMVLASTTAK

SEQ ID NO: 680 - protein, 10 aa, human influenza virus
ALASCMGLIY

SEQ ID NO: 681 - protein, 9 aa, human influenza virus
MMMGMFNML

SEQ ID NO: 682 - protein, 20 aa, human influenza virus
TYVLSIIPSGPLKAEIAQRL

SEQ ID NO: 683 - protein, 9 aa, human influenza virus
SIIPSGPLK

SEQ ID NO: 684 - protein, 9 aa, human influenza virus
ASNENMETM

SEQ ID NO: 685 - protein, 10 aa, human influenza virus
SSLENFRAYV

SEQ ID NO: 686 - protein, 9 aa, human influenza virus
ASNENMDAM

SEQ ID NO: 687 - protein, 12 aa, human influenza virus
SFYRNVVWLIKK

SEQ ID NO: 688 - protein, 10 aa, human influenza virus
SSLENFRAYV

SEQ ID NO: 689 - protein, 10 aa, human influenza virus
SSAENFRAYV

SEQ ID NO: 690 - protein, 10 aa, human influenza virus
SSLENFAAYV

SEQ ID NO: 691 - protein, 9 aa, human influenza virus
LYIWGVHHP

SEQ ID NO: 692 - protein, 15 aa, Pseudorabies virus
PVLFGEPFRAVCVVR

SEQ ID NO: 693 - protein, 20 aa, Pseudorabies virus
SVRFVEGFAVCDGLCVPPEA

SEQ ID NO: 694 - protein, 385 aa, Pseudorabies virus
ADVDAVPAPTFPPPAYPYTESWQLTLTTVPSPFVGPADVYHTRPLEDPCGVVALISDPQVDRLLNEAVAHRRPTYRAHVAWYRIADGCAHLLYFIEYADCDPRQVFGRCRRRTTPMWWTPSADYMFPTEDELGLLMVAPGRFNEGQYRRLVSVDGVNILTDFMVALPEGQECPFARVDQHRTYKFGACWSDDSFKRGVDVMRFLTPFYQQPPHREVVNYWYRKNGRTLPRAHAAATPYAIDPARPSAGSPRPRPRPRPRPRPKPEPAPATPAPPDRLPEPATRDHAAGGRPTPRPPRPETPHRPFAPPAVVPSGWPQPAEPFQPRTPAAPGVSRHRSVIVGTGTAMGALLVGVCVYIFFRLRGAKGYRLLGGPADADELKAQPGP

SEQ ID NO: 695 - protein, 338 aa, Pseudorabies virus
ADVDAVPAPTFPPPAYPYTESWQLTLTTVPSPFVGPADVYHTRPLEDPCGVVALISDPQVDRLLNEAVAHRRPTYRAHVAWYRIADGCAHLLYFIEYADCDPRQVFGRCRRRTTPMWWTPSADYMFPTEDELGLLMVAPGRFNEGQYRRLVSVDGVNILTDFMVALPEGQECPFARVDQHRTYKFGACWSDDSFKRGVDVMRFLTPFYQQPPHREVVNYWYRKNGRTLPRAHAAATPYAIDPARPSAGSPRPRPRPRPRPRPKPEPAPATPAPPDRLPEPATRDHAAGGRPTPRPPRPETPHRPFAPPAVVPSGWPQPAEPFQPRTPAAPGVSRHRSV

SEQ ID NO: 696 - protein, 284 aa, Pseudorabies virus
ADVDAVPAPTFPPPAYPYTESWQLTLTTVPSPFVGPADVYHTRPLEDPCGVVALISDPQVDRLLNEAVAHRRPTYRAHVAWYRIADGCAHLLYFIEYADCDPRQVFGRCRRRTTPMWWTPSADYMFPTEDELGLLMVAPGRFNEGQYRRLVSVDGVNILTDFMVALPEGQECPFARVDQHRTYKFGACWSDDSFKRGVDVMRFLTPFYQQPPHREVVNYWYRKNGRTLPRAHAAATPYAIDPARPSAGSPRPRPRPRPRPRPKPEPAPATPAPPDRLPEPATRD

SEQ ID NO: 697 - protein, 278 aa, African swine fever virus
MQIFVKTLTGKTITLEVEPSDTIENVKAKIQDKEGIPPDQQRLIFAGKQLEDGRTLSDYNIQKESTLHLVLRLRGAAADFILNISMKMEVIFKTDLRSSSQVVFHAGSLYNWFSVEIINSGRIVTTAIKTLLSTVKYDIVKSARIYAGQGYTEHQAQEEWNMILHVLFEEETESSASSENIHEKNDNETNECTSSFETLFEQEPSSEVPKDSKLYMLAQKTVQHIEQYGKAPDFNKVIRAHNFIQTIYGTPLKEEEKEVVRLMVIKLLKKISFYLTYI

SEQ ID NO: 698 - protein, 386 aa, equine herpesvirus
TQKLSLGLYNQWWRVCRSVPPPWYVFFNKRSMSTFKLMMDGRLVFAMAIAILSVVLSCGTCEKAKRAVRGRQDRPKEFPPPRYNYTILTRYNATALASPFINDQVKNVDLRIVTATRPCEMIALIAKTNIDSILKELAAAQKTYSARLTWFKIMPTCATPIHDVSYMKCNPKLSFAMCDERSDILWQASLITMAAETDDELGLVLAAPAHSASGLYRRVIEIDGRRIYTDFSVTIPSERCPIAFEQNFGNPDRCKTPEQYSRGEVFTRRFLGEFNFPQGEHMTWLKFWFVYDGGNLPVQFYEAQAFARPVPPDNHPGFDSVESEITQNKTDPKPGQADPKPNQPFKWPSIKHLAPRLDEVDEVIEPVTKPPKTSKSNSTFVGISVG

SEQ ID NO: 699 - protein, 433 aa, equine herpesvirus
TQKLSLGLYNQWWRVCRSVPPPWYVFFNKRSMSTFKLMMDGRLVFAMAIAILSVVLSCGTCEKAKRAVRGRQDRPKEFPPPRYNYTILTRYNATALASPFINDQVKNVDLRIVTATRPCEMIALIAKTNIDSILKELAAAQKTYSARLTWFKIMPTCATPIHDVSYMKCNPKLSFAMCDERSDILWQASLITMAAETDDELGLVLAAPAHSASGLYRRVIEIDGRRIYTDFSVTIPSERCPIAFEQNFGNPDRCKTPEQYSRGEVFTRRFLGEFNFPQGEHMTWLKFWFVYDGGNLPVQFYEAQAFARPVPPDNHPGFDSVESEITQNKTDPKPGQADPKPNQPFKWPSIKHLAPRLDEVDEVIEPVTKPPKTSKSNSTFVGISVGLGIAGLVLVGVILYVCLRRKKELKKSAQNGLTRLRSTFKDVKYTQLP

SEQ ID NO: 700 - protein, 19 aa, equine herpesvirus
MPAVLLVLYVNPPPSVCIL

SEQ ID NO: 701 - protein, 16 aa, coronavirus
NYNYKYRYLRGKLRPF

SEQ ID NO: 702 - protein, 15 aa, coronavirus
PLQASLPFGWLVIGV

SEQ ID NO: 703 - protein, 10 aa, coronavirus
TLACFVLAAV

SEQ ID NO: 704 - protein, 10 aa, coronavirus
GYQPYRVVVL

SEQ ID NO: 705 - protein, 10 aa, coronavirus
QPYRVVVLSF

SEQ ID NO: 706 - protein, 9 aa, coronavirus
PYRVVVLSF

SEQ ID NO: 707 - protein, 15 aa, coronavirus
KPSFYVYSRVKNLNS

SEQ ID NO: 708 - protein, 15 aa, coronavirus
NIVNVSLVKPSFYVY

SEQ ID NO: 709 - protein, 9 aa, coronavirus
VSDGGPNLY

SEQ ID NO: 710 - protein, 15 aa, coronavirus
VIGAVILRGHLRIAG

SEQ ID NO: 711 - protein, 15 aa, coronavirus
FNATRFASVYAWNRK

SEQ ID NO: 712 - protein, 15 aa, coronavirus
ADSFVIRGDEVRQIA

SEQ ID NO: 713 - protein, 15 aa, coronavirus
ISNCVADYSVLYNSA

SEQ ID NO: 714 - protein, 15 aa, coronavirus
IWLGFIAGLIAIVMV

SEQ ID NO: 715 - protein, 15 aa, coronavirus
FLHVTYVPAQEKNFT

SEQ ID NO: 716 - protein, 98 aa, Artificial Sequence
  SYNTHETIC CONSTRUCT DERIVED FROM HUMAN THOUGHT
MHGDTPTLHEYMLDLQPETTDLYCYEQLDDSSEEEDEIDGPAGQAEPDRAHYNIVTFCCKCDSTLRLCVQSTHVDIRTLEDLLMGTLGIVCPICSQKP

SEQ ID NO: 717 - protein, 9 aa, Homo sapiens
IYNEYIYDL

SEQ ID NO: 718 - protein, 9 aa, Homo sapiens
EYYELFVNI

SEQ ID NO: 719 - protein, 19 aa, Artificial Sequence
  SYNTHETIC CONSTRUCT DERIVED FROM HUMAN THOUGHT
  MISC_FEATURE (1)..(19): X is any amino acid
MAXXNXFXXXXLPXXDRLT

SEQ ID NO: 720 - protein, 20 aa, Artificial Sequence
  SYNTHETIC CONSTRUCT DERIVED FROM HUMAN THOUGHT
  MISC_FEATURE (1)..(20): X1 is any residue
  MISC_FEATURE (1)..(20): X2 is N or G
  MISC_FEATURE (1)..(20): X3 is 0-2 of any residues
  MISC_FEATURE (1)..(20): X4 is I or L
  MISC_FEATURE (1)..(20): X5 is Q or E
  MISC_FEATURE (1)..(20): X6 is any 2 residues
  MISC_FEATURE (1)..(20): X7 is A or T
  MISC_FEATURE (1)..(20): X8 is any residue
  MISC_FEATURE (1)..(20): X9 is any residue
  MISC_FEATURE (1)..(20): X10 is any residue
  MISC_FEATURE (1)..(20): X11 is any residue
PXXWXPSXXXXXPXXXPATP

SEQ ID NO: 721 - protein, 16 aa, Artificial Sequence
  SYNTHETIC CONSTRUCT DERIVED FROM HUMAN THOUGHT
  MISC_FEATURE (1)..(16): X1 is any about 4 AAs
  MISC_FEATURE (1)..(16): X2 is any 2-3 AAs
  MISC_FEATURE (1)..(16): X3 is I or V
  MISC_FEATURE (1)..(16): X4 is any residue
  MISC_FEATURE (1)..(16): X5 is N or G
  MISC_FEATURE (1)..(16): X6 is any residue
  MISC_FEATURE (1)..(16): X7 is any residue
  MISC_FEATURE (1)..(16): X8 is S or A
  MISC_FEATURE (1)..(16): X9 is about 9 AAs comprising 1-4 P residues
PXAPXXPXXWXXPXXP

SEQ ID NO: 722 - protein, 13 aa, Artificial Sequence
  SYNTHETIC CONSTRUCT DERIVED FROM HUMAN THOUGHT
QIPPNWHIPSIQD

SEQ ID NO: 723 - protein, 132 aa, Artificial Sequence
  SYNTHETIC CONSTRUCT DERIVED FROM HUMAN THOUGHT
  MISC_FEATURE (1)..(132): X1, X5,X12, X13, X14, X17, X23, X26, X28, X31-X34, X40, and X43 are any AA
  MISC_FEATURE (1)..(132): X2 is Q or R
  MISC_FEATURE (1)..(132): X3 is D or E
  MISC_FEATURE (1)..(132): X4 is T or A
  MISC_FEATURE (1)..(132): X6 is L or I
  MISC_FEATURE (1)..(132): X7 is I or V
  MISC_FEATURE (1)..(132): X8 is V or A
  MISC_FEATURE (1)..(132): X9 is N or K
  MISC_FEATURE (1)..(132): X10 is I or L
  MISC_FEATURE (1)..(132): X11 is T or S
  MISC_FEATURE (1)..(132): X15 is S or T
  MISC_FEATURE (1)..(132): X16 is K or R
  MISC_FEATURE (1)..(132): X18 is V or I
  MISC_FEATURE (1)..(132): X19 is S or N
  MISC_FEATURE (1)..(132): X20 is K or Q
  MISC_FEATURE (1)..(132): X21 is I or V
  MISC_FEATURE (1)..(132): X22 is F or Y
  MISC_FEATURE (1)..(132): X24 is N or G
  MISC_FEATURE (1)..(132): X25 is M or L
  MISC_FEATURE (1)..(132): X27 is K or N
  MISC_FEATURE (1)..(132): X29 is T or N
  MISC_FEATURE (1)..(132): X30 is S or N
  MISC_FEATURE (1)..(132): X35 is L or M
  MISC_FEATURE (1)..(132): X36 is K or E
  MISC_FEATURE (1)..(132): X37 is E or N
  MISC_FEATURE (1)..(132): X38 is T or V
  MISC_FEATURE (1)..(132): X39 is F or Y
  MISC_FEATURE (1)..(132): X41 is S or T
  MISC_FEATURE (1)..(132): X42 is N or D
  MISC_FEATURE (1)..(132): X44 is D or E
MDLPYYHGXLTKXXCEXLLLKXGVDGNFLXRDSESXPGXLCLCVSFKXXVYXYRIFREKHGYYRIQTXXXXPXXXFPXLXELXSKXXKPXQGXVVHLXXPIXRXXXXXRXRGXXLELXXXXNXXXXYVDVLP

SEQ ID NO: 724 - protein, 296 aa, Porcine circovirus
VRRESPKHRWCFTINDWTPTEWESIVECGGSIARYLIIGKEVGKSGTPHLQGYVNFKNKRRLSSVKRLPGFGRAHLEPARGSHKEASEYCKKEGDYLEIGEDSSSGTRSDLQAAARILTETAGNLTEVAEKMPAVFIRYGRGLRDFCGVMGLGKPRDFKTEVYVFIGPPGCGKTREACADAAARELQLYFKPRGPWWDGYNGEGAVILDDFYGWVPFDELLRIGDRYPLRVPVKGGFVNFVAKVLYITSNVVPEEWYSSENIRGKLEALFRRFTKVVCWGEGGVKKDMETVYPINY

SEQ ID NO: 725 - protein, 296 aa, Porcine circovirus
VRRESPKHRWCFTINNWTPTEWESIVECGGSIARYLIIGKEVGKSGTPHLQGYVNFKNKRRLSSVKRLPGFGRAHLEPARGSHKEASEYCKKEGDYLEIGEDSSSGTRSDLQAAARILTETAGDLTEVAEKMPAVFIRYGRGLRDFCGVMGLGKPRDFKTEVYVFIGPPGCGKTREACADAAARELQLYFKPRGPWWDGYNGEGAVILDDFYGWVPFDELLRIGDRYPLRVPVKGGFVNFVAKVLYITSNVVPEEWYSSENIRGKLEALFRRFTKVVCWGEGGVKKDMETVYPINY

SEQ ID NO: 726 - protein, 296 aa, Porcine circovirus
VRRESPKHRWCFTINDWTPTEWESIVECGGSIARYLIIGKEVGKSGTPHLQGYVNFKNKRRLSSVKRLPGFGRAHLEPARGSHKEASEYCKKEGDYLEIGEDSSSGTRSDLQAAARILTETAGDLTEVAEKMPAVFIRYGRGLRDFCGVMGLGKPRDFKTEVYVFIGPPGCGKTREACADAAARELQLYFKPRGPWWDGYNGEGAVILDDFYGWVPFDELLRIGDRYPLRVPVKGGFVNFVAKVLYITSNVVPEEWYSSENIRGKLEALFRRFTKVVCWGEGGVKKDMETVYPINY

SEQ ID NO: 727 - protein, 296 aa, Porcine circovirus
VRRESPKHRWCFTINNWTPTEWESIVECGGSIARYLIIGKEVGKSGTPHLQGYVNFKNKRRLSSVKRLPGFGRAHLEPARGSHKEASEYCKKEGDYLEIGEDSSSGTRSDLQAAARILTETAGNLTEVAEKMPAVFIRYGRGLRDFCGVMGLGKPRDFKTEVYVFIGPPGCGKTREACADAAARELQLYFKPRGPWWDGYNGEGAVILDDFYGWVPFDELLRIGDRYPLRVPVKGGFVNFVAKVLYITSNVVPEEWYSSENIRGKLEALFRRFTKVVCWGEGGVKKDMETVYPINY

SEQ ID NO: 728 - protein, 214 aa, Porcine circovirus
MRHRAIFRRRPRPRRRRRHRRRYVRRKLFIRRPTAGTYYTKKYSTMNVISVGTPQNNKPWHANHFITRLNEWETAISFEYYKILKMKVTLSPVISPAQQTKTMFGHTAIDLDGAWTTNTWLQDDPYAESSTRKVMTSKKKHSRYFTPKPILAGTTSAHPGQSLFFFSRPTPWLNTYDPTVQWGALLWSIYVPEKTGMTDFYGTKEVWIRYKSVL

SEQ ID NO: 729 - protein, 10 aa, Human immunodeficiency virus
RKKRRQRRRR

SEQ ID NO: 730 - protein, 5 aa, Artificial Sequence
  SYNTHETIC CONSTRUCT DERIVED FROM HUMAN THOUGHT
GPGPG

SEQ ID NO: 731 - protein, 5 aa, Artificial Sequence
  SYNTHETIC CONSTRUCT DERIVED FROM HUMAN THOUGHT
YVPGP

SEQ ID NO: 732 - protein, 5 aa, Homo sapiens
YVPGP

SEQ ID NO: 733 - protein, 7 aa, human influenza virus
KRRSNKS

SEQ ID NO: 734 - protein, 15 aa, African swine fever virus
SFLNLTKLYHHHSHY

SEQ ID NO: 735 - protein, 15 aa, African swine fever virus
KYNLNRKKSHYTDLL

SEQ ID NO: 736 - protein, 15 aa, African swine fever virus
NRKKSHYTDLLFICS

SEQ ID NO: 737 - protein, 15 aa, African swine fever virus
SPPPKPCPPPKPCPP

SEQ ID NO: 738 - protein, 15 aa, African swine fever virus
KPCPPPKPCPPPKPC

SEQ ID NO: 739 - protein, 18 aa, African swine fever virus
PEERCTYKFNSYTKKMEL

SEQ ID NO: 740 - protein, 19 aa, African swine fever virus
DQEEKKALQNKETKNLGIP

SEQ ID NO: 741 - protein, 9 aa, Homo sapiens
KQMNDARHG

SEQ ID NO: 742 - protein, 9 aa, Homo sapiens
LSKITEQEK

SEQ ID NO: 743 - protein, 9 aa, Homo sapiens
STRDPLSKI
